(19) United States
(12) Patent Application Publication
(10) Pub. No.: US 2024/0279659 A1
(43) Pub. Date: Aug. 22, 2024

(54) RECRUITMENT METHODS AND COMPOUNDS, COMPOSITIONS AND SYSTEMS FOR RECRUITMENT

(71) Applicant: Pairwise Plants Services, Inc., Durham, NC (US)

(72) Inventors: Aaron Hummel, Hillsborough, NC (US); Shai Joshua Lawit, Durham, NC (US); Jingyi Nie, Durham, NC (US); Sabine Fräbel, Durham, NC (US); Sharon Leigh Guffy, Durham, NC (US)

(21) Appl. No.: 18/626,460

(22) Filed: Apr. 4, 2024

Related U.S. Application Data
(63) Continuation of application No. 17/113,068, filed on Dec. 6, 2020, now Pat. No. 11,976,278.
(60) Provisional application No. 62/944,976, filed on Dec. 6, 2019.

(51) Int. Cl. C12N 15/113; C07K 14/195

(52) U.S. Cl. CPC C12N 15/113; C07K 14/195; C07K 2319/21; C07K 2319/22; C12N 2310/20

(57) ABSTRACT

Described herein are recruitment methods and compounds, compositions, and systems for recruitment. Such methods and compounds, compositions, and systems include the use of fusion proteins of Agrobacterium effector proteins, recruiting motifs, and/or nucleic acid binding polypeptides. Also described herein are methods and compositions for template editing of genomic DNA using Agrobacterium-derived T-DNA molecules and/or proteins.

[0001] A Sequence Listing in XML text format, entitled 1499-13CT_ST26.xml, 1,267,450 bytes in size, generated on Mar. 19, 2024, and filed herewith, is hereby incorporated by reference into the specification for its disclosures.

### FIELD

[0002] The invention relates to recruitment methods and to compounds, compositions, and systems for recruitment. The invention also relates to methods and compositions for template editing of genomic DNA such as using Agrobacterium-derived T-DNA molecules and/or proteins.

### BACKGROUND

[0003] Precise templated editing is difficult to perform in most eukaryotic cell types due to extremely low efficiency of recovery of cells with the desired editing outcome. The low efficiency is caused by several steps in a complex process. For example, after a double strand break (DSB) is made in a eukaryotic genome, the DSB can be repaired by templated editing only when there is a template that is in the local vicinity of the DSB and that template must be immediately available during the brief period of time when the repair complex is competent to perform homology-directed repair.

[0004] The best templated editing efficiencies in eukaryotes other than yeast have been accomplished in human cell culture where the delivery of a cocktail of reagents, for example, a DNA endonuclease or nickase, a repair template, non-homologous end-joining (NHEJ) inhibitors, homology directed repair (HDR) stimulators, can be coordinated with high efficiency. It is known that single-stranded DNA, especially long ssDNA, is the most efficient template for homologous recombination in eukaryotic cells. Thus, in contrast to double-stranded DNA, in human cells, single-stranded DNA can be an efficient repair template for long or short edits. However, in plants, ssDNA is difficult to deliver efficiently, and editing is currently limited primarily to using short ssDNA oligonucleotides as repair templates that are delivered into plant cells by particle bombardment.

[0005] To date, the majority of templated editing successes in plants have been achieved using particle bombardment of DNA expression cassettes and repair templates. The editing efficiencies reported are generally less than 10%, with many studies reporting a less than 1% efficiency. Further, particle bombardment and oligonucleotide repair templates allow only small changes to be made (typically less than 40 bases). Currently, there is no reliable capability for generating large edits in plants, or for introducing whole gene cassettes or gene stacks, such as in site-directed integration. The tools that are available and the level of efficiency of editing that they provide in plants are inadequate to support robust trait discovery pipelines in crops.

[0006] The present invention overcomes previous shortcomings in the art by providing new gene editing tools for use in plants.

### SUMMARY OF THE INVENTION

[0007] A first aspect of the present invention is directed to a fusion protein comprising a bacterial transfer protein and a recruiting motif (e.g., an affinity polypeptide, an RNA recruiting motif, or a peptide tag). In some embodiments, a composition, system, kit, and/or complex of the present invention includes a fusion protein comprising a bacterial transfer protein and a recruiting motif (e.g., an affinity polypeptide, an RNA recruiting motif, or a peptide tag).

[0008] Another aspect of the present invention is directed to a fusion protein comprising a bacterial transfer protein and a nucleic acid binding polypeptide. In some embodiments, a composition, system, kit, and/or complex of the present invention includes a fusion protein comprising a bacterial transfer protein and a nucleic acid binding polypeptide.

[0009] A further aspect of the present invention is directed to a fusion protein comprising an Agrobacterium effector protein and a recruiting motif (e.g., an affinity polypeptide, an RNA recruiting motif, or a peptide tag). In some embodiments, a composition, system, kit, and/or complex of the present invention includes a fusion protein comprising an Agrobacterium effector protein and a recruiting motif (e.g., an affinity polypeptide, an RNA recruiting motif, or a peptide tag).

[0010] An additional aspect of the present invention is directed to a fusion protein comprising an Agrobacterium effector protein and a nucleic acid binding polypeptide. In some embodiments, a composition, system, kit, and/or complex of the present invention includes a fusion protein comprising an Agrobacterium effector protein and a nucleic acid binding polypeptide.

[0011] A further aspect of the present invention is directed to a fusion protein comprising a nucleic acid binding polypeptide and a recruiting motif (e.g., an affinity polypeptide, an RNA recruiting motif, or a peptide tag). In some embodiments, a composition, system, kit, and/or complex of the present invention includes a fusion protein comprising a nucleic acid binding polypeptide and a recruiting motif (e.g., an affinity polypeptide, an RNA recruiting motif, or a peptide tag).

[0012] Another aspect of the present invention is directed to a method of modifying a target nucleic acid, the method comprising: contacting a target nucleic acid with a nucleic acid binding polypeptide, a guide nucleic acid, and a fusion protein comprising a bacterial transfer protein and a recruiting motif (e.g., an affinity polypeptide, an RNA recruiting motif, or a peptide tag), optionally wherein the nucleic acid binding polypeptide and the guide nucleic acid form a complex or are comprised in a complex, thereby modifying the target nucleic acid. In some embodiments, the bacterial transfer protein is an Agrobacterium effector protein.

[0013] A further aspect of the present invention is directed to a method of modifying a target nucleic acid, the method comprising: contacting a target nucleic acid with a guide nucleic acid and a fusion protein comprising a bacterial transfer protein and a nucleic acid binding polypeptide, optionally wherein the fusion protein and the guide nucleic acid form a complex or are comprised in a complex, thereby modifying the target nucleic acid. In some embodiments, the bacterial transfer protein is an Agrobacterium effector protein.

[0014] An additional aspect of the present invention is directed to a method of modifying a target nucleic acid, the method comprising: contacting a target nucleic acid with an bacterial transfer protein, a guide nucleic acid, and a fusion protein comprising a nucleic acid binding polypeptide and a recruiting motif, optionally wherein the fusion protein and the guide nucleic acid form a complex or are comprised in a complex, thereby modifying the target nucleic acid. In some embodiments, the bacterial transfer protein is an Agrobacterium effector protein.

[0015] Another aspect of the invention provides a composition comprising a domain fused to a recruiting motif (e.g., an affinity polypeptide or a peptide tag), wherein the domain is capable of interacting with a T-DNA sequence.

[0016] A further aspect of the invention provides a composition comprising a nucleic acid binding polypeptide fused to an affinity polypeptide, wherein the affinity polypeptide is capable of binding a domain that is capable of interacting with a T-DNA sequence, optionally wherein the affinity polypeptide is an antibody capable of binding an Agrobacterium effector protein.

[0017] An additional aspect of the invention provides a composition comprising (a) a domain that is capable of interacting with a T-DNA sequence (e.g., an Agrobacterium effector protein) fused to: (i) a nucleic acid binding polypeptide; and/or (ii) a domain that is capable of interacting with a nucleic acid binding polypeptide (e.g., an affinity polypeptide (e.g., a polypeptide capable of binding a peptide tag)).

[0018] A further aspect of the invention provides a composition comprising a nucleic acid binding polypeptide fused to an affinity polypeptide, wherein the affinity polypeptide is capable of binding a domain that is capable of interacting with a T-DNA sequence, optionally wherein the affinity polypeptide is an antibody capable of binding an Agrobacterium effector protein.

[0019] Another aspect of the invention provides a system comprising: (a) an Agrobacterium effector fusion protein comprising an Agrobacterium effector protein fused to a peptide tag; (b) a CRISPR-Cas effector fusion protein comprising a CRISPR-Cas effector protein fused to an affinity polypeptide that is capable of interacting with the peptide tag; (c) optionally a T-DNA; and (d) a CRISPR guide nucleic acid comprising a spacer sequence and a repeat sequence, wherein the guide nucleic acid is capable of forming a complex with the CRISPR-Cas effector protein of the CRISPR-Cas fusion protein and the spacer sequence is capable of hybridizing to a target nucleic acid, thereby guiding the CRISPR-Cas fusion protein to the target nucleic acid, wherein the affinity polypeptide of the CRISPR-Cas fusion protein interacts with the peptide tag of the Agrobacterium effector fusion protein and optionally the Agrobacterium effector protein associates with the T-DNA, if present, thereby recruiting the Agrobacterium effector protein and optionally the T-DNA to the CRISPR-Cas effector protein and to the target nucleic acid, whereby the system is capable of modifying the target nucleic acid.

[0020] A further aspect of the invention provides a system comprising: (a) a CRISPR-Cas effector fusion protein comprising a CRISPR-Cas effector protein fused to a peptide tag; (b) an Agrobacterium effector fusion protein comprising an Agrobacterium effector protein fused to an affinity polypeptide that is capable of interacting with the peptide tag; (c) a optionally T-DNA sequence; and (d) a CRISPR guide nucleic acid comprising a spacer sequence and a repeat sequence, wherein the guide nucleic acid is capable of forming a complex with the CRISPR-Cas effector protein of the CRISPR-Cas fusion protein and the spacer sequence is capable of hybridizing to a target nucleic acid, thereby guiding the CRISPR-Cas fusion protein to the target nucleic acid, wherein the peptide tag of the CRISPR-Cas fusion protein interacts with the affinity polypeptide of the Agrobacterium effector fusion protein and optionally the Agrobacterium effector protein associates with (covalently links to, e.g., VirD2; non-covalently with, e.g., VirE2) the T-DNA sequence, if present, thereby recruiting the Agrobacterium effector protein and optionally the T-DNA sequence to the CRISPR-Cas effector protein and to the target nucleic acid, whereby the system is capable of modifying the target nucleic acid.

[0021] Another aspect of the invention provides a system comprising: (a) an Agrobacterium effector protein; (b) a CRISPR-Cas effector fusion protein comprising a CRISPR-Cas effector protein fused to an affinity polypeptide that is capable of interacting with the Agrobacterium effector protein (e.g., an antibody to the Agrobacterium effector protein); (c) optionally a T-DNA sequence; and (d) a CRISPR guide nucleic acid comprising a spacer sequence and a repeat sequence, wherein the guide nucleic acid is capable of forming a complex with the CRISPR-Cas effector protein of the CRISPR-Cas fusion protein and the spacer sequence is capable of hybridizing to a target nucleic acid, thereby guiding the CRISPR-Cas fusion protein to the target nucleic acid, wherein the affinity polypeptide of the CRISPR-Cas fusion protein interacts with the Agrobacterium effector protein and optionally the Agrobacterium effector protein associates with the T-DNA, if present, thereby recruiting the Agrobacterium effector protein and optionally the T-DNA to the CRISPR-Cas effector protein and to the target nucleic acid, whereby the system is capable of modifying the target nucleic acid.

[0022] A further aspect of the invention provides a method of modifying a target nucleic acid in a plant, comprising contacting the target nucleic acid with any of the fusion proteins, compositions, complexes, and/or the systems of the invention.

[0023] Another aspect of the invention provides a method of modifying a target nucleic acid, the method comprising: contacting a target nucleic acid with (a) a domain that is capable of interacting with a T-DNA sequence (e.g., an Agrobacterium effector protein), (b) (i) a nucleic acid binding polypeptide or (ii) a domain that is capable of interacting with the nucleic acid binding polypeptide, and (c) a T-DNA sequence.

[0024] A further aspect of the invention provides a method of modifying a target nucleic acid, the method comprising: (a)(i) a first CRISPR-Cas effector protein; and (ii) a first T-DNA sequence; and (b)(i) a second CRISPR-Cas effector protein, (ii) a DNA-dependent DNA polymerase; and (ii) a first guide nucleic acid, thereby modifying the target nucleic acid.

[0025] An additional aspect of the invention provides a system comprising: (a) an Agrobacterium effector fusion protein comprising an Agrobacterium effector protein fused to a peptide tag, (b) a CRISPR-Cas effector fusion protein comprising a CRISPR-Cas effector protein fused to an affinity polypeptide that is capable of interacting with the peptide tag; (c) optionally a T-DNA and (d) a CRISPR guide nucleic acid comprising a spacer sequence and a repeat sequence, wherein the guide nucleic acid is capable of forming a complex with the CRISPR-Cas effector protein of the CRISPR-Cas fusion protein and the spacer sequence is capable of hybridizing to a target nucleic acid, thereby guiding the CRISPR-Cas fusion protein to the target nucleic acid, wherein the affinity polypeptide of the CRISPR-Cas fusion protein interacts with the peptide tag of the Agrobacterium effector fusion protein and optionally the Agrobacterium effector protein associates with the T-DNA, if present, thereby recruiting the Agrobacterium effector protein and optionally the T-DNA to the CRISPR-Cas effector protein and to the target nucleic acid, whereby the system is capable of modifying the target nucleic acid.

[0026] An further aspect of the invention provides a system comprising: (a) a CRISPR-Cas effector fusion protein comprising a CRISPR-Cas effector protein fused to a peptide tag; (b) an Agrobacterium effector fusion protein comprising an Agrobacterium effector protein fused to an affinity polypeptide that is capable of interacting with the peptide tag; (c) optionally a T-DNA and (d) a CRISPR guide nucleic acid comprising a spacer sequence and a repeat sequence, wherein the guide nucleic acid is capable of forming a complex with the CRISPR-Cas effector protein of the CRISPR-Cas fusion protein and the spacer sequence is capable of hybridizing to a target nucleic acid, thereby guiding the CRISPR-Cas fusion protein to the target nucleic acid, wherein the peptide tag of the CRISPR-Cas fusion protein interacts with the affinity polypeptide of the Agrobacterium effector fusion protein and the Agrobacterium effector protein associates with (covalently links to, e.g., VirD2; non-covalently with, e.g., VirE2) the T-DNA, thereby recruiting the Agrobacterium effector protein and optionally the T-DNA to the CRISPR-Cas effector protein and to the target nucleic acid, whereby the system is capable of modifying the target nucleic acid.

[0027] Another aspect of the invention provides a system comprising: (a) an Agrobacterium effector protein; (b) a CRISPR-Cas effector fusion protein comprising a CRISPR-Cas effector protein fused to an affinity polypeptide that is capable of interacting with the Agrobacterium effector protein (e.g., an antibody to the Agrobacterium effector protein); (c) optionally a T-DNA and (d) a CRISPR guide nucleic acid comprising a spacer sequence and a repeat sequence, wherein the guide nucleic acid is capable of forming a complex with the CRISPR-Cas effector protein of the CRISPR-Cas fusion protein and the spacer sequence is capable of hybridizing to a target nucleic acid, thereby guiding the CRISPR-Cas fusion protein to the target nucleic acid, wherein the affinity polypeptide of the CRISPR-Cas fusion protein interacts with the Agrobacterium effector protein and optionally the Agrobacterium effector protein associates with (covalently links to, e.g., VirD2; non-covalently with, e.g., VirE2)) the T-DNA, if present, thereby recruiting the Agrobacterium effector protein and optionally the T-DNA to the CRISPR-Cas effector protein and to the target nucleic acid, whereby the system is capable of modifying the target nucleic acid.

[0028] Another aspect of the invention provides a method of modifying a target nucleic acid, comprising contacting a target nucleic acid with (a) a domain that is capable of interacting with a T-DNA sequence (e.g., an Agrobacterium effector protein), (b) (i) a nucleic acid binding polypeptide or (ii) a domain that is capable of interacting with the nucleic acid binding polypeptide, and (c) a T-DNA sequence.

[0029] An additional aspect of the invention provides a method of modifying a target nucleic acid, the method comprising: contacting the target nucleic acid with a composition of the invention capable of interacting with (binding) the target nucleic acid in a sequence specific manner; and recruiting to the target nucleic acid at least one T-DNA sequence comprising a nucleic acid sequence to be edited into the target nucleic acid.

[0030] A further aspect of the invention provides a method of modifying a target nucleic acid, the method comprising: (a) a nucleic acid binding polypeptide; (b) a DNA-dependent DNA polymerase; (c) a T-DNA including a primer binding site with complementarity to the sequence of a nicked target DNA strand, and, optionally, (d) a guide nucleic acid (e.g., Type V CRISPR RNA, Type V CRISPR DNA, Type V crRNA, Type V crDNA).

[0031] Another aspect of the invention provides a method of modifying a target nucleic acid, the method comprising: (a)(i) a first CRISPR-Cas effector protein; and (ii) a first T-DNA sequence; and (b)(i) a second CRISPR-Cas effector protein, (ii) a DNA-dependent DNA polymerase; and (ii) a first guide nucleic acid, thereby modifying the target nucleic acid.

[0032] A further aspect of the invention provides an engineered Agrobacterium strain comprising a bacterial transfer protein (e.g., an Agrobacterium effector protein) fused to a recruiting motif (e.g., an affinity polypeptide or a peptide tag).

[0033] The invention further provides expression cassettes and/or vectors comprising nucleic acids of the invention and nucleic acids encoding the proteins of the invention. In addition, the invention provides cells comprising the compositions, polypeptides, fusion proteins, nucleic acids, expression cassettes and/or vectors of the invention. Additionally, the invention provides kits comprising the compositions, polypeptides, fusion proteins, nucleic acids, expression cassettes, and/or vectors of the invention and/or cells comprising the same. These and other aspects of the invention are set forth in more detail in the description of the invention below.

### BRIEF DESCRIPTION OF THE DRAWINGS

[0034] FIG. 1 shows fluorescent microscopy images of N. benthamiana leaves at 10-11 days after infiltration according to some embodiments of the present invention. All images were taken with the same instrument settings.

[0035] FIG. 2 is a graph showing INDEL frequency of recruited Cas12a (with no nuclear localization signal) in infiltrated N. benthamiana leaves at 10-11 days after infiltration according to some embodiments of the present invention.

[0036] FIG. 3 is a schematic of an Agrobacterium expression cassette for an exemplary LbCas12a crRNA according to some embodiments of the present invention.

[0037] FIG. 4 is an image of a 1% agarose gel including RT-PCR products from samples corresponding to Box 1 wells A2, A6, A7, B2, C3, D3, F3 and F9 with GeneRuler 1 kb Plus DNA Ladder in wells 1 and 10. Samples A2, D3 and F3 produced the expected sized bands.

[0038] FIG. 5 is a diagram illustrating Sanger sequenced PCR products mapped to their regions of overlap on the targeted insertion.

[0039] FIG. 6 is an image of a 1% agarose gel including RT-PCR products from samples corresponding to Box 1 wells B3 (lane 1), G7 (lane 4), F9 (lane 7) and GeneRuler 1 kb Plus DNA Ladder in lane 9.

[0040] FIG. 7 is an image of a gel including semi-nested PCR products.

[0041] FIG. 8 is another diagram illustrating Sanger sequenced PCR products mapped to their regions of overlap on the targeted insertion.

[0042] FIG. 9 shows fluorescent microscopy images, taken at 10-11 days after infiltration, of successful T-DNA encoded zsgreen delivery by modified VirD2 into the plant cell nucleus.

### DETAILED DESCRIPTION

[0043] The present invention now will be described hereinafter with reference to the accompanying drawings and examples, in which embodiments of the invention are shown. This description is not intended to be a detailed catalog of all the different ways in which the invention may be implemented, or all the features that may be added to the instant invention. For example, features illustrated with respect to one embodiment may be incorporated into other embodiments, and features illustrated with respect to a particular embodiment may be deleted from that embodiment. Thus, the invention contemplates that in some embodiments of the invention, any feature or combination of features set forth herein can be excluded or omitted. In addition, numerous variations and additions to the various embodiments suggested herein will be apparent to those skilled in the art in light of the instant disclosure, which do not depart from the instant invention. Hence, the following descriptions are intended to illustrate some particular embodiments of the invention, and not to exhaustively specify all permutations, combinations and variations thereof.

[0044] Unless otherwise defined, all technical and scientific terms used herein have the same meaning as commonly understood by one of ordinary skill in the art to which this invention belongs. The terminology used in the description of the invention herein is for the purpose of describing particular embodiments only and is not intended to be limiting of the invention.

[0045] All publications, patent applications, patents and other references cited herein are incorporated by reference in their entireties for the teachings relevant to the sentence and/or paragraph in which the reference is presented.

[0046] Unless the context indicates otherwise, it is specifically intended that the various features of the invention described herein can be used in any combination. Moreover, the present invention also contemplates that in some embodiments of the invention, any feature or combination of features set forth herein can be excluded or omitted. To illustrate, if the specification states that a composition comprises components A, B and C, it is specifically intended that any of A, B or C, or a combination thereof, can be omitted and disclaimed singularly or in any combination.

[0047] As used in the description of the invention and the appended claims, the singular forms “a,” “an” and “the” are intended to include the plural forms as well, unless the context clearly indicates otherwise.

[0048] Also as used herein, “and/or” refers to and encompasses any and all possible combinations of one or more of the associated listed items, as well as the lack of combinations when interpreted in the alternative (“or”).

[0049] The term “about,” as used herein when referring to a measurable value such as an amount or concentration and the like, is meant to encompass variations of ±10%, ±5%, ±1%, ±0.5%, or even ±0.1% of the specified value as well as the specified value. For example, “about X” where × is the measurable value, is meant to include × as well as variations of ±10%, ±5%, ±1%, ±0.5%, or even ±0.1% of X. A range provided herein for a measureable value may include any other range and/or individual value therein.

[0050] As used herein, phrases such as “between × and Y” and “between about × and Y” should be interpreted to include × and Y. As used herein, phrases such as “between about X and Y” mean “between about × and about Y” and phrases such as “from about × to Y” mean “from about × to about Y.”

[0051] Recitation of ranges of values herein are merely intended to serve as a shorthand method of referring individually to each separate value falling within the range, unless otherwise indicated herein, and each separate value is incorporated into the specification as if it were individually recited herein. For example, if the range 10 to 15 is disclosed, then 11, 12, 13, and 14 are also disclosed.

[0052] The term “comprise,” “comprises” and “comprising” as used herein, specify the presence of the stated features, integers, steps, operations, elements, and/or components, but do not preclude the presence or addition of one or more other features, integers, steps, operations, elements, components, and/or groups thereof.

[0053] As used herein, the transitional phrase “consisting essentially of” means that the scope of a claim is to be interpreted to encompass the specified materials or steps recited in the claim and those that do not materially affect the basic and novel characteristic(s) of the claimed invention. Thus, the term “consisting essentially of” when used in a claim of this invention is not intended to be interpreted to be equivalent to “comprising.”

[0054] As used herein, the terms “increase,” “increasing,” “enhance,” “enhancing,” “improve” and “improving” (and grammatical variations thereof) describe an elevation of at least about 5%, 10%, 15%, 20%, 25%, 30%, 35%, 40%, 45%, 50%, 55%, 60%, 65%, 70%, 75%, 80%, 85%, 90%, 95%, 100%, 150%, 200%, 300%, 400%, 500% or more such as compared to another measurable property or quantity (e.g., a control value).

[0055] As used herein, the terms “reduce,” “reduced,” “reducing,” “reduction,” “diminish,” and “decrease” (and grammatical variations thereof), describe, for example, a decrease of at least about 5%, 10%, 15%, 20%, 25%, 30%, 35%, 40%, 45%, 50%, 55%, 60%, 65%, 70%, 75%, 80%, 85%, 90%, 95%, 97%, 98%, 99%, or 100% such as compared to another measurable property or quantity (e.g., a control value). In some embodiments, the reduction can result in no or essentially no (i.e., an insignificant amount, e.g., less than about 10% or even 5%) detectable activity or amount.

[0056] A “heterologous” or a “recombinant” nucleotide sequence is a nucleotide sequence not naturally associated with a host cell into which it is introduced, including non-naturally occurring multiple copies of a naturally occurring nucleotide sequence.

[0057] A “native” or “wild type” nucleic acid, nucleotide sequence, polypeptide or amino acid sequence refers to a naturally occurring or endogenous nucleic acid, nucleotide sequence, polypeptide or amino acid sequence. Thus, for example, a “wild type mRNA” is an mRNA that is naturally occurring in or endogenous to the reference organism. A “homologous” nucleic acid sequence is a nucleotide sequence naturally associated with a host cell into which it is introduced.

[0058] As used herein, the terms “nucleic acid,” “nucleic acid molecule,” “nucleotide sequence” and “polynucleotide” refer to RNA or DNA that is linear or branched, single or double stranded, or a hybrid thereof. The term also encompasses RNA/DNA hybrids. When dsRNA is produced synthetically, less common bases, such as inosine, 5-methylcytosine, 6-methyladenine, hypoxanthine and others can also be used for antisense, dsRNA, and ribozyme pairing. For example, polynucleotides that contain C-5 propyne analogues of uridine and cytidine have been shown to bind RNA with high affinity and to be potent antisense inhibitors of gene expression. Other modifications, such as modification to the phosphodiester backbone, or the 2′-hydroxy in the ribose sugar group of the RNA can also be made.

[0059] As used herein, the term “nucleotide sequence” refers to a heteropolymer of nucleotides or the sequence of these nucleotides from the 5′ to 3′ end of a nucleic acid molecule and includes DNA or RNA molecules, including cDNA, a DNA fragment or portion, genomic DNA, synthetic (e.g., chemically synthesized) DNA, plasmid DNA, mRNA, and anti-sense RNA, any of which can be single stranded or double stranded. The terms “nucleotide sequence” “nucleic acid,” “nucleic acid molecule,” “nucleic acid construct,” “recombinant nucleic acid,” “oligonucleotide” and “polynucleotide” are also used interchangeably herein to refer to a heteropolymer of nucleotides. Nucleic acid molecules and/or nucleotide sequences provided herein are presented herein in the 5′ to 3′ direction, from left to right and are represented using the standard code for representing the nucleotide characters as set forth in the U.S. sequence rules, 37 CFR §§ 1.821-1.825 and the World Intellectual Property Organization (WIPO) Standard ST.25. A “5′ region” as used herein can mean the region of a polynucleotide that is nearest the 5′ end of the polynucleotide. Thus, for example, an element in the 5′ region of a polynucleotide can be located anywhere from the first nucleotide located at the 5′ end of the polynucleotide to the nucleotide located halfway through the polynucleotide. A “3′ region” as used herein can mean the region of a polynucleotide that is nearest the 3′ end of the polynucleotide. Thus, for example, an element in the 3′ region of a polynucleotide can be located anywhere from the first nucleotide located at the 3′ end of the polynucleotide to the nucleotide located halfway through the polynucleotide.

[0060] As used herein, the term “gene” refers to a nucleic acid molecule capable of being used to produce mRNA, antisense RNA, miRNA, anti-microRNA antisense oligodeoxyribonucleotide (AMO) and the like. Genes may or may not be capable of being used to produce a functional protein or gene product. Genes can include both coding and non-coding regions (e.g., introns, regulatory elements, promoters, enhancers, termination sequences and/or 5′ and 3′ untranslated regions). A gene may be “isolated” by which is meant a nucleic acid that is substantially or essentially free from components normally found in association with the nucleic acid in its natural state. Such components include other cellular material, culture medium from recombinant production, and/or various chemicals used in chemically synthesizing the nucleic acid.

[0061] The term “mutation” refers to point mutations (e.g., missense, or nonsense, or insertions or deletions of single base pairs that result in frame shifts), insertions, deletions, and/or truncations. When the mutation is a substitution of a residue within an amino acid sequence with another residue, or a deletion or insertion of one or more residues within a sequence, the mutations are typically described by identifying the original residue followed by the position of the residue within the sequence and by the identity of the newly substituted residue.

[0062] The terms “complementary” or “complementarity,” as used herein, refer to the natural binding of polynucleotides under permissive salt and temperature conditions by base-pairing. For example, the sequence “A-G-T” (5′ to 3′) binds to the complementary sequence “T-C-A” (3′ to 5′). Complementarity between two single-stranded molecules may be “partial,” in which only some of the nucleotides bind, or it may be complete when total complementarity exists between the single stranded molecules. The degree of complementarity between nucleic acid strands has significant effects on the efficiency and strength of hybridization between nucleic acid strands.

[0063] “Complement” as used herein can mean 100% complementarity with the comparator nucleotide sequence or it can mean less than 100% complementarity (e.g., “substantially complementary” such as about 70%, 71%, 72%, 73%, 74%, 75%, 76%, 77%, 78%, 79%, 80%, 81%, 82%, 83%, 84%, 85%, 86%, 87%, 88%, 89%, 90%, 91%, 92%, 93%, 94%, 95%, 96%, 97%, 98%, 99%, and the like, complementarity).

[0064] A “portion” or “fragment” of a nucleotide sequence or polypeptide sequence will be understood to mean a nucleotide or polypeptide sequence of reduced length (e.g., reduced by 1, 2, 3, 4, 5, 6, 7, 8, 9, 10, 11, 12, 13, 14, 15, 16, 17, 18, 19, 20 or more residue(s) (e.g., nucleotide(s) or peptide(s)) relative to a reference nucleotide or polypeptide sequence, respectively, and comprising, consisting essentially of and/or consisting of a nucleotide or polypeptide sequence of contiguous residues, respectively, identical or almost identical (e.g., 70%, 71%, 72%, 73%, 74%, 75%, 76%, 77%, 78%, 79%, 80%, 81%, 82%, 83%, 84%, 85%, 86%, 87%, 88%, 89%, 90%, 91%, 92%, 93%, 94%, 95%, 96%, 97%, 98%, 99% identical) to the reference nucleotide or polypeptide sequence. Such a nucleic acid fragment or portion according to the invention may be, where appropriate, included in a larger polynucleotide of which it is a constituent. As an example, a repeat sequence of guide nucleic acid of this invention may comprise a portion of a wild type CRISPR-Cas repeat sequence (e.g., a wild type CRISR-Cas repeat; e.g., a repeat from the CRISPR Cas system that includes, but is not limited to, a Cas9, Cas12a (Cpf1), Cas12b, Cas12c (C2c3), Cas12d (CasY), Cas12e (CasX), Cas12g, Cas12h, Cas12i, C2c1, C2c4, C2c5, C2c8, C2c9, C2c10, Cas14a, Cas14b, and/or a Cas14c, and the like).

[0065] Different nucleic acids or proteins having homology are referred to herein as “homologues.” The term homologue includes homologous sequences from the same and other species and orthologous sequences from the same and other species. “Homology” refers to the level of similarity between two or more nucleic acid and/or amino acid sequences in terms of percent of positional identity (i.e., sequence similarity or identity). Homology also refers to the concept of similar functional properties among different nucleic acids or proteins. Thus, the compositions and methods of the invention further comprise homologues to the nucleotide sequences and polypeptide sequences of this invention. “Orthologous,” as used herein, refers to homologous nucleotide sequences and/or amino acid sequences in different species that arose from a common ancestral gene during speciation. A homologue of a nucleotide sequence of this invention has a substantial sequence identity (e.g., at least about 70%, 71%, 72%, 73%, 74%, 75%, 76%, 77%, 78%, 79%, 80%, 81%, 82%, 83%, 84%, 85%, 86%, 87%, 88%, 89%, 90%, 91%, 92%, 93%, 94%, 95%, 96%, 97%, 98%, 99%, 99.5% or 100%) to said nucleotide sequence of the invention.

[0066] As used herein “sequence identity” refers to the extent to which two optimally aligned polynucleotide or polypeptide sequences are invariant throughout a window of alignment of components, e.g., nucleotides or amino acids. “Identity” can be readily calculated by known methods including, but not limited to, those described in: Computational Molecular Biology (Lesk, A. M., ed.) Oxford University Press, New York (1988); Biocomputing: Informatics and Genome Projects (Smith, D. W., ed.) Academic Press, New York (1993); Computer Analysis of Sequence Data, Part I (Griffin, A. M., and Griffin, H. G., eds.) Humana Press, New Jersey (1994); Sequence Analysis in Molecular Biology (von Heinje, G., ed.) Academic Press (1987); and Sequence Analysis Primer (Gribskov, M. and Devereux, J., eds.) Stockton Press, New York (1991).

[0067] As used herein, the term “percent sequence identity” or “percent identity” refers to the percentage of identical nucleotides in a linear polynucleotide sequence of a reference (“query”) polynucleotide molecule (or its complementary strand) as compared to a test (“subject”) polynucleotide molecule (or its complementary strand) when the two sequences are optimally aligned. In some embodiments, “percent identity” can refer to the percentage of identical amino acids in an amino acid sequence as compared to a reference polypeptide.

[0068] As used herein, the phrase “substantially identical,” or “substantial identity” in the context of two nucleic acid molecules, nucleotide sequences or protein sequences, refers to two or more sequences or subsequences that have at least about 70%, 71%, 72%, 73%, 74%, 75%, 76%, 77%, 78%, 79%, 80%, 81%, 82%, 83%, 84%, 85%, 86%, 87%, 88%, 89%, 90%, 91%, 92%, 93%, 94%, 95%, 96%, 97%, 98%, 99%, 99.5% or 100% nucleotide or amino acid residue identity, when compared and aligned for maximum correspondence, as measured using one of the following sequence comparison algorithms or by visual inspection. In some embodiments of the invention, the substantial identity exists over a region of consecutive nucleotides of a nucleotide sequence of the invention that is about 10 nucleotides to about 20 nucleotides, about 10 nucleotides to about 25 nucleotides, about 10 nucleotides to about 30 nucleotides, about 15 nucleotides to about 25 nucleotides, about 30 nucleotides to about 40 nucleotides, about 50 nucleotides to about 60 nucleotides, about 70 nucleotides to about 80 nucleotides, about 90 nucleotides to about 100 nucleotides, or more nucleotides in length, and any range therein, up to the full length of the sequence. In some embodiments, the nucleotide sequences can be substantially identical over at least about 20 nucleotides (e.g., about 20, 21, 22, 23, 24, 25, 26, 27, 28, 29, 30, 31, 32, 33, 34, 35, 36, 37, 38, 39, 40 nucleotides). In some embodiments, a substantially identical nucleotide or protein sequence performs substantially the same function as the nucleotide (or encoded protein sequence) to which it is substantially identical.

[0069] For sequence comparison, typically one sequence acts as a reference sequence to which test sequences are compared. When using a sequence comparison algorithm, test and reference sequences are entered into a computer, subsequence coordinates are designated if necessary, and sequence algorithm program parameters are designated. The sequence comparison algorithm then calculates the percent sequence identity for the test sequence(s) relative to the reference sequence, based on the designated program parameters.

[0070] Optimal alignment of sequences for aligning a comparison window are well known to those skilled in the art and may be conducted by tools such as the local homology algorithm of Smith and Waterman, the homology alignment algorithm of Needleman and Wunsch, the search for similarity method of Pearson and Lipman, and optionally by computerized implementations of these algorithms such as GAP, BESTFIT, FASTA, and TFASTA available as part of the GCG® Wisconsin Package® (Accelrys Inc., San Diego, CA). An “identity fraction” for aligned segments of a test sequence and a reference sequence is the number of identical components which are shared by the two aligned sequences divided by the total number of components in the reference sequence segment, e.g., the entire reference sequence or a smaller defined part of the reference sequence. Percent sequence identity is represented as the identity fraction multiplied by 100. The comparison of one or more polynucleotide sequences may be to a full-length polynucleotide sequence or a portion thereof, or to a longer polynucleotide sequence. For purposes of this invention “percent identity” may also be determined using BLASTX version 2.0 for translated nucleotide sequences and BLASTN version 2.0 for polynucleotide sequences.

[0071] Two nucleotide sequences may also be considered substantially complementary when the two sequences hybridize to each other under stringent conditions. In some representative embodiments, two nucleotide sequences considered to be substantially complementary hybridize to each other under highly stringent conditions.

[0072] “Stringent hybridization conditions” and “stringent hybridization wash conditions” in the context of nucleic acid hybridization experiments such as Southern and Northern hybridizations are sequence dependent, and are different under different environmental parameters. An extensive guide to the hybridization of nucleic acids is found in Tijssen Laboratory Techniques in Biochemistry and Molecular Biology-Hybridization with Nucleic Acid Probes part I chapter 2 “Overview of principles of hybridization and the strategy of nucleic acid probe assays” Elsevier, New York (1993). Generally, highly stringent hybridization and wash conditions are selected to be about 5° C. lower than the thermal melting point (Tₘ) for the specific sequence at a defined ionic strength and pH.

[0073] The Tₘ is the temperature (under defined ionic strength and pH) at which 50% of the target sequence hybridizes to a perfectly matched probe. Very stringent conditions are selected to be equal to the Tₘ for a particular probe. An example of stringent hybridization conditions for hybridization of complementary nucleotide sequences which have more than 100 complementary residues on a filter in a Southern or northern blot is 50% formamide with 1 mg of heparin at 42° C., with the hybridization being carried out overnight. An example of highly stringent wash conditions is 0.1 5M NaCl at 72° C. for about 15 minutes. An example of stringent wash conditions is a 0.2×SSC wash at 65° C. for 15 minutes (see, Sambrook, infra, for a description of SSC buffer). Often, a high stringency wash is preceded by a low stringency wash to remove background probe signal. An example of a medium stringency wash for a duplex of, e.g., more than 100 nucleotides, is 1×SSC at 45° C. for 15 minutes. An example of a low stringency wash for a duplex of, e.g., more than 100 nucleotides, is 4-6×SSC at 40° C. for 15 minutes. For short probes (e.g., about 10 to 50 nucleotides), stringent conditions typically involve salt concentrations of less than about 1.0 M Na ion, typically about 0.01 to 1.0 M Na ion concentration (or other salts) at pH 7.0 to 8.3, and the temperature is typically at least about 30° C. Stringent conditions can also be achieved with the addition of destabilizing agents such as formamide. In general, a signal to noise ratio of 2× (or higher) than that observed for an unrelated probe in the particular hybridization assay indicates detection of a specific hybridization. Nucleotide sequences that do not hybridize to each other under stringent conditions are still substantially identical if the proteins that they encode are substantially identical. This can occur, for example, when a copy of a nucleotide sequence is created using the maximum codon degeneracy permitted by the genetic code.

[0074] A polynucleotide and/or recombinant nucleic acid construct of this invention can be codon optimized for expression. In some embodiments, a polynucleotide, nucleic acid construct, expression cassette, and/or vector of the invention (e.g., that comprises/encodes a nucleic acid binding polypeptide (e.g., a DNA binding domain such as a nucleic acid binding polypeptide from a polynucleotide-guided endonuclease, a zinc finger nuclease, a transcription activator-like effector nucleases (TALEN), an endonuclease (e.g. Fok1), an Argonaute protein, and/or a CRISPR-Cas effector protein (e.g., a Type I CRISPR-Cas effector protein, a Type II CRISPR-Cas effector protein, a Type III CRISPR-Cas effector protein, a Type IV CRISPR-Cas effector protein, a Type V CRISPR-Cas effector protein or a Type VI CRISPR-Cas effector protein))), a domain is capable of interacting with a T-DNA sequence (e.g., Agrobacterium effector proteins; e.g., VirD2 and/or VirE2), a T-DNA sequence, affinity polypeptides, peptide tags, RNA recruiting motifs, fusion proteins, a DNA-dependent DNA polymerase and the like) are codon optimized for expression in an organism (e.g., an animal, a plant, a fungus, an archaeon, or a bacterium). In some embodiments, the codon optimized nucleic acid constructs, polynucleotides, expression cassettes, and/or vectors of the invention have about 70% to about 99.9% (e.g., 70%, 71%, 72%, 73%, 74%, 75%, 76%, 77%, 78%, 79%, 80%, 81%, 82%, 83%, 84%, 85%, 86%, 87%, 88%, 89%, 90%, 91%, 92%, 93%, 94%, 95%, 96%, 97%, 98%, 99%, 99.5%. 99.9% or 100%) identity or more to the reference nucleic acid constructs, polynucleotides, expression cassettes, and/or vectors that have not been codon optimized.

[0075] In any of the embodiments described herein, a polynucleotide or nucleic acid construct of the invention may be operatively associated with a variety of promoters and/or other regulatory elements for expression in an organism or cell thereof (e.g., a plant and/or a cell of a plant). Thus, in some embodiments, a polynucleotide or nucleic acid construct of this invention may further comprise one or more promoters, introns, enhancers, and/or terminators operably linked to one or more nucleotide sequences. In some embodiments, a promoter may be operably associated with an intron (e.g., Ubi1 promoter and intron). In some embodiments, a promoter associated with an intron maybe referred to as a “promoter region” (e.g., Ubi1 promoter and intron).

[0076] By “operably linked” or “operably associated” as used herein in reference to polynucleotides, it is meant that the indicated elements are functionally related to each other, and are also generally physically related. Thus, the term “operably linked” or “operably associated” as used herein, refers to nucleotide sequences on a single nucleic acid molecule that are functionally associated. Thus, a first nucleotide sequence that is operably linked to a second nucleotide sequence means a situation when the first nucleotide sequence is placed in a functional relationship with the second nucleotide sequence. For instance, a promoter is operably associated with a nucleotide sequence if the promoter effects the transcription or expression of said nucleotide sequence. Those skilled in the art will appreciate that the control sequences (e.g., promoter) need not be contiguous with the nucleotide sequence to which it is operably associated, as long as the control sequences function to direct the expression thereof. Thus, for example, intervening untranslated, yet transcribed, nucleic acid sequences can be present between a promoter and the nucleotide sequence, and the promoter can still be considered “operably linked” to the nucleotide sequence.

[0077] As used herein, the term “linked” or “fused” in reference to polypeptides, refers to the attachment of one polypeptide to another. A polypeptide may be linked or fused to another polypeptide (at the N-terminus or the C-terminus) directly (e.g., via a peptide bond) or through a linker (e.g., a peptide linker).

[0078] The term “linker” in reference to polypeptides is art-recognized and refers to a chemical group, or a molecule linking two molecules or moieties, e.g., two domains of a fusion protein, such as, for example, a DNA binding polypeptide or domain (e.g., a CRISPR-Cas effector protein) and a peptide tag and/or an Agrobacterium effector protein and an affinity polypeptide that binds to the peptide tag. A linker may be comprised of a single linking molecule (e.g., a single amino acid) or may comprise more than one linking molecule. In some embodiments, the linker can be an organic molecule, group, polymer, or chemical moiety such as a bivalent organic moiety. In some embodiments, the linker may be an amino acid or it may be a peptide. In some embodiments, the linker is a peptide.

[0079] In some embodiments, a peptide linker useful with this invention may be about 2 to about 100 or more amino acids in length, for example, about 2, 3, 4, 5, 6, 7, 8, 9, 10, 11, 12, 13, 14, 15, 16, 17, 18, 19, 20, 21, 22, 23, 24, 25, 26, 27, 28, 29, 30, 31, 32, 33, 34, 35, 36, 37, 38, 39, 40, 41, 42, 43, 44, 45, 46, 47, 48, 49, 50, 51, 52, 53, 54, 55, 56, 57, 58, 59, 60, 61, 62, 63, 64, 65, 66, 67, 68, 69, 70, 71, 72, 73, 74, 75, 76, 77, 78, 79, 80, 81, 82, 83, 84, 85, 86, 87, 88, 89, 90, 91, 92, 93, 94, 95, 96, 97, 98, 99, 100 or more amino acids in length (e.g., about 2 to about 40, about 2 to about 50, about 2 to about 60, about 4 to about 40, about 4 to about 50, about 4 to about 60, about 5 to about 40, about 5 to about 50, about 5 to about 60, about 9 to about 40, about 9 to about 50, about 9 to about 60, about 10 to about 40, about 10 to about 50, about 10 to about 60, or about 2, 3, 4, 5, 6, 7, 8, 9, 10, 11, 12, 13, 14, 15, 16, 17, 18, 19, 20, 21, 22, 23, 24, 25 amino acids to about 26, 27, 28, 29, 30, 31, 32, 33, 34, 35, 36, 37, 38, 39, 40, 41, 42, 43, 44, 45, 46, 47, 48, 49, 50, 51, 52, 53, 54, 55, 56, 57, 58, 59, 60, 61, 62, 63, 64, 65, 66, 67, 68, 69, 70, 71, 72, 73, 74, 75, 76, 77, 78, 79, 80, 81, 82, 83, 84, 85, 86, 87, 88, 89, 90, 91, 92, 93, 94, 95, 96, 97, 98, 99, 100 or more amino acids in length (e.g., about 105, 110, 115, 120, 130, 140, 150 or more amino acids in length). In some embodiments, a peptide linker may be a GS linker.

[0080] As used herein, the term “linked,” or “fused” in reference to polynucleotides, refers to the attachment of one polynucleotide to another. In some embodiments, two or more polynucleotide molecules may be linked by a linker that can be an organic molecule, group, polymer, or chemical moiety such as a bivalent organic moiety. A polynucleotide may be linked or fused to another polynucleotide (at the 5′ end or the 3′ end) via a covalent or non-covenant linkage or binding, including e.g., Watson-Crick base-pairing, or through one or more linking nucleotides. In some embodiments, a polynucleotide motif of a certain structure may be inserted within another polynucleotide sequence (e.g. extension of the hairpin structure in guide RNA). In some embodiments, the linking nucleotides may be naturally occurring nucleotides. In some embodiments, the linking nucleotides may be non-naturally occurring nucleotides.

[0081] A “promoter” is a nucleotide sequence that controls or regulates the transcription of a nucleotide sequence (e.g., a coding sequence) that is operably associated with the promoter. The coding sequence controlled or regulated by a promoter may encode a polypeptide and/or a functional RNA. Typically, a “promoter” refers to a nucleotide sequence that contains a binding site for RNA polymerase II and directs the initiation of transcription. In general, promoters are found 5′, or upstream, relative to the start of the coding region of the corresponding coding sequence. A promoter may comprise other elements that act as regulators of gene expression; e.g., a promoter region. These include a TATA box consensus sequence, and often a CAAT box consensus sequence (Breathnach and Chambon, (1981) Annu. Rev. Biochem. 50:349). In plants, the CAAT box may be substituted by the AGGA box (Messing et al., (1983) in Genetic Engineering of Plants, T. Kosuge, C. Meredith and A. Hollaender (eds.), Plenum Press, pp. 211-227). In some embodiments, a promoter region may comprise at least one intron (e.g., SEQ ID NO:1 or SEQ ID NO:2).

[0082] Promoters useful with this invention can include, for example, constitutive, inducible, temporally regulated, developmentally regulated, chemically regulated, tissue-preferred and/or tissue-specific promoters for use in the preparation of recombinant nucleic acid molecules, e.g., “synthetic nucleic acid constructs” or “protein-RNA complex.” These various types of promoters are known in the art.

[0083] The choice of promoter may vary depending on the temporal and spatial requirements for expression, and also may vary based on the host cell to be transformed. Promoters for many different organisms are well known in the art. Based on the extensive knowledge present in the art, the appropriate promoter can be selected for the particular host organism of interest. Thus, for example, much is known about promoters upstream of highly constitutively expressed genes in model organisms and such knowledge can be readily accessed and implemented in other systems as appropriate.

[0084] In some embodiments, a promoter functional in a plant may be used with the constructs of this invention. Non-limiting examples of a promoter useful for driving expression in a plant include the promoter of the RubisCo small subunit gene 1 (PrbcS1), the promoter of the actin gene (Pactin), the promoter of the nitrate reductase gene (Pnr) and the promoter of duplicated carbonic anhydrase gene 1 (Pdca1) (See, Walker et al. Plant Cell Rep. 23:727-735 (2005); Li et al. Gene 403:132-142 (2007); Li et al. Mol Biol. Rep. 37:1143-1154 (2010)). PrbcS1 and Pactin are constitutive promoters and Pnr and Pdca1 are inducible promoters. Pnr is induced by nitrate and repressed by ammonium (Li et al. Gene 403:132-142 (2007)) and Pdca1 is induced by salt (Li et al. Mol Biol. Rep. 37:1143-1154 (2010)). In some embodiments, a promoter useful with this invention is RNA polymerase II (Pol II) promoter. In some embodiments, a U6 promoter or a 7SL promoter from Zea mays may be useful with constructs of this invention. In some embodiments, the U6c promoter and/or 7SL promoter from Zea mays may be useful for driving expression of a guide nucleic acid. In some embodiments, a U6c promoter, U6i promoter and/or 7SL promoter from Glycine max may be useful with constructs of this invention. In some embodiments, the U6c promoter, U6i promoter and/or 7SL promoter from Glycine max may be useful for driving expression of a guide nucleic acid.

[0085] Examples of constitutive promoters useful for plants include, but are not limited to, cestrum virus promoter (cmp) (U.S. Pat. No. 7,166,770), the rice actin 1 promoter (Wang et al. (1992) Mol. Cell. Biol. 12:3399-3406; as well as U.S. Pat. No. 5,641,876), CaMV 35S promoter (Odell et al. (1985) Nature 313:810-812), CaMV 19S promoter (Lawton et al. (1987) Plant Mol. Biol. 9:315-324), nos promoter (Ebert et al. (1987) Proc. Natl. Acad. Sci USA 84:5745-5749), Adh promoter (Walker et al. (1987) Proc. Natl. Acad. Sci. USA 84:6624-6629), sucrose synthase promoter (Yang & Russell (1990) Proc. Natl. Acad. Sci. USA 87:4144-4148), and the ubiquitin promoter. The constitutive promoter derived from ubiquitin accumulates in many cell types. Ubiquitin promoters have been cloned from several plant species for use in transgenic plants, for example, sunflower (Binet et al., 1991. Plant Science 79: 87-94), maize (Christensen et al., 1989. Plant Molec. Biol. 12: 619-632), and arabidopsis (Norris et al. 1993. Plant Molec. Biol. 21:895-906). The maize ubiquitin promoter (UbiP) has been developed in transgenic monocot systems and its sequence and vectors constructed for monocot transformation are disclosed in the European patent publication EP0342926. The ubiquitin promoter is suitable for the expression of the nucleotide sequences of the invention in transgenic plants, especially monocotyledons. Further, the promoter expression cassettes described by McElroy et al. (Mol. Gen. Genet. 231: 150-160 (1991)) can be easily modified for the expression of the nucleotide sequences of the invention and are particularly suitable for use in monocotyledonous hosts.

[0086] In some embodiments, tissue specific/tissue preferred promoters can be used for expression of a heterologous polynucleotide in a plant cell. Tissue specific or preferred expression patterns include, but are not limited to, green tissue specific or preferred, root specific or preferred, stem specific or preferred, flower specific or preferred or pollen specific or preferred. Promoters suitable for expression in green tissue include many that regulate genes involved in photosynthesis and many of these have been cloned from both monocotyledons and dicotyledons. In one embodiment, a promoter useful with the invention is the maize PEPC promoter from the phosphoenol carboxylase gene (Hudspeth & Grula, Plant Molec. Biol. 12:579-589 (1989)). Non-limiting examples of tissue-specific promoters include those associated with genes encoding the seed storage proteins (such as β-conglycinin, cruciferin, napin and phaseolin), zein or oil body proteins (such as oleosin), or proteins involved in fatty acid biosynthesis (including acyl carrier protein, stearoyl-ACP desaturase and fatty acid desaturases (fad 2-1)), and other nucleic acids expressed during embryo development (such as Bce4, see, e.g., Kridl et al. (1991) Seed Sci. Res. 1:209-219; as well as EP Patent No. 255378). Tissue-specific or tissue-preferential promoters useful for the expression of the nucleotide sequences of the invention in plants, particularly maize, include but are not limited to those that direct expression in root, pith, leaf or pollen. Such promoters are disclosed, for example, in WO 93/07278, incorporated by reference herein for its disclosure of promoters. Other non-limiting examples of tissue specific or tissue preferred promoters useful with the invention the cotton rubisco promoter disclosed in U.S. Pat. No. 6,040,504; the rice sucrose synthase promoter disclosed in U.S. Pat. No. 5,604,121; the root specific promoter described by de Framond (FEBS 290:103-106 (1991); European patent EP0452269 to Ciba-Geigy); the stem specific promoter described in U.S. Pat. No. 5,625,136 (to Ciba-Geigy) and which drives expression of the maize trpA gene; the cestrum yellow leaf curling virus promoter disclosed in WO 01/73087; and pollen specific or preferred promoters including, but not limited to, ProOsLPS10 and ProOsLPS11 from rice (Nguyen et al. Plant Biotechnol. Reports 9(5):297-306 (2015)), ZmSTK2_USP from maize (Wang et al. Genome 60(6):485-495 (2017)), LAT52 and LAT59 from tomato (Twell et al. Development 109(3):705-713 (1990)), Zml3 (U.S. Pat. No. 10,421,972), PLA₂-δ promoter from arabidopsis (U.S. Pat. No. 7,141,424), and/or the ZmC5 promoter from maize (International PCT Publication No. WO1999/042587.

[0087] Additional examples of plant tissue-specific/tissue preferred promoters include, but are not limited to, the root hair-specific cis-elements (RHEs) (Kim et al. The Plant Cell 18:2958-2970 (2006)), the root-specific promoters RCc3 (Jeong et al. Plant Physiol. 153:185-197 (2010)) and RB7 (U.S. Pat. No. 5,459,252), the lectin promoter (Lindstrom et al. (1990) Der. Genet. 11:160-167; and Vodkin (1983) Prog. Clin. Biol. Res. 138:87-98), corn alcohol dehydrogenase 1 promoter (Dennis et al. (1984) Nucleic Acids Res. 12:3983-4000), S-adenosyl-L-methionine synthetase (SAMS) (Vander Mijnsbrugge et al. (1996) Plant and Cell Physiology, 37(8):1108-1115), corn light harvesting complex promoter (Bansal et al. (1992) Proc. Natl. Acad. Sci. USA 89:3654-3658), corn heat shock protein promoter (O'Dell et al. (1985) EMBO J. 5:451-458; and Rochester et al. (1986) EMBO J. 5:451-458), pea small subunit RuBP carboxylase promoter (Cashmore, “Nuclear genes encoding the small subunit of ribulose-1,5-bisphosphate carboxylase” pp. 29-39 In: Genetic Engineering of Plants (Hollaender ed., Plenum Press 1983; and Poulsen et al. (1986) Mol. Gen. Genet. 205:193-200), Ti plasmid mannopine synthase promoter (Langridge et al. (1989) Proc. Natl. Acad. Sci. USA 86:3219-3223), Ti plasmid nopaline synthase promoter (Langridge et al. (1989), supra), petunia chalcone isomerase promoter (van Tunen et al. (1988) EMBO J. 7:1257-1263), bean glycine rich protein 1 promoter (Keller et al. (1989) Genes Dev. 3:1639-1646), truncated CaMV 35S promoter (O'Dell et al. (1985) Nature 313:810-812), potato patatin promoter (Wenzler et al. (1989) Plant Mol. Biol. 13:347-354), root cell promoter (Yamamoto et al. (1990) Nucleic Acids Res. 18:7449), maize zein promoter (Kriz et al. (1987) Mol. Gen. Genet. 207:90-98; Langridge et al. (1983) Cell 34:1015-1022; Reina et al. (1990) Nucleic Acids Res. 18:6425; Reina et al. (1990) Nucleic Acids Res. 18:7449; and Wandelt et al. (1989) Nucleic Acids Res. 17:2354), globulin-1 promoter (Belanger et al. (1991) Genetics 129:863-872), α-tubulin cab promoter (Sullivan et al. (1989) Mol. Gen. Genet. 215:431-440), PEPCase promoter (Hudspeth & Grula (1989) Plant Mol. Biol. 12:579-589), R gene complex-associated promoters (Chandler et al. (1989) Plant Cell 1:1175-1183), and chalcone synthase promoters (Franken et al. (1991) EMBO J. 10:2605-2612).

[0088] Useful for seed-specific expression is the pea vicilin promoter (Czako et al. (1992) Mol. Gen. Genet. 235:33-40; as well as the seed-specific promoters disclosed in U.S. Pat. No. 5,625,136. Useful promoters for expression in mature leaves are those that are switched at the onset of senescence, such as the SAG promoter from Arabidopsis (Gan et al. (1995) Science 270:1986-1988).

[0089] In addition, promoters functional in chloroplasts can be used. Non-limiting examples of such promoters include the bacteriophage T3 gene 9 5′ UTR and other promoters disclosed in U.S. Pat. No. 7,579,516. Other promoters useful with the invention include but are not limited to the S-E9 small subunit RuBP carboxylase promoter and the Kunitz trypsin inhibitor gene promoter (Kti3).

[0090] Additional regulatory elements useful with this invention include, but are not limited to, introns, enhancers, termination sequences and/or 5′ and 3′ untranslated regions.

[0091] An intron useful with this invention can be an intron identified in and isolated from a plant and then inserted into an expression cassette to be used in transformation of a plant. As would be understood by those of skill in the art, introns can comprise the sequences required for self-excision and are incorporated into nucleic acid constructs/expression cassettes in frame. An intron can be used either as a spacer to separate multiple protein-coding sequences in one nucleic acid construct, or an intron can be used inside one protein-coding sequence to, for example, stabilize the mRNA. If they are used within a protein-coding sequence, they are inserted “in-frame” with the excision sites included. Introns may also be associated with promoters to improve or modify expression. As an example, a promoter/intron combination useful with this invention includes but is not limited to that of the maize Ubi1 promoter and intron.

[0092] Non-limiting examples of introns useful with the present invention include introns from the ADHI gene (e.g., Adh1-S introns 1, 2 and 6), the ubiquitin gene (Ubi1), the RuBisCO small subunit (rbcS) gene, the RuBisCO large subunit (rbcL) gene, the actin gene (e.g., actin-1 intron), the pyruvate dehydrogenase kinase gene (pdk), the nitrate reductase gene (nr), the duplicated carbonic anhydrase gene 1 (Tdca1), the psbA gene, the atpA gene, or any combination thereof.

[0093] An editing system useful with this invention can be any site-specific (sequence-specific) genome editing system now known or later developed, which system can introduce mutations in a target specific manner. For example, an editing system (e.g., site- or sequence-specific editing system) can include, but is not limited to, a CRISPR-Cas editing system, a meganuclease editing system, a zinc finger nuclease (ZFN) editing system, a transcription activator-like effector nuclease (TALEN) editing system, a base editing system and/or a prime editing system, each of which can comprise one or more polypeptides and/or one or more polynucleotides that when expressed as a system in a cell can modify (mutate) a target nucleic acid in a sequence specific manner. In some embodiments, an editing system (e.g., site- or sequence-specific editing system) can comprise one or more polynucleotides and/or one or more polypeptides, including but not limited to a nucleic acid binding polypeptide (DNA binding domain), a nuclease, and/or other polypeptide, and/or a polynucleotide.

[0094] In some embodiments, an editing system can comprise one or more sequence-specific nucleic acid binding polypeptides (e.g., DNA binding domains) that can be from, for example, a polynucleotide-guided endonuclease, a CRISPR-Cas endonuclease (e.g., CRISPR-Cas effector protein), a zinc finger nuclease, a transcription activator-like effector nuclease (TALEN) and/or an Argonaute protein. In some embodiments, an editing system can comprise one or more cleavage domains (e.g., nucleases) including, but not limited to, an endonuclease (e.g., Fok1), a polynucleotide-guided endonuclease, a CRISPR-Cas endonuclease (e.g., CRISPR-Cas effector protein), a zinc finger nuclease, and/or a transcription activator-like effector nuclease (TALEN).

[0095] A “nucleic acid binding protein” or “nucleic acid binding polypeptide” as used herein refers to a polypeptide that binds and/or is capable of binding a nucleic acid in a site- and/or sequence specific manner. In some embodiments, a nucleic acid binding polypeptide comprises a DNA binding domain. In some embodiments, a nucleic acid binding polypeptide may be a sequence-specific nucleic acid binding polypeptide (e.g., a sequence-specific DNA binding domain) such as, but not limited to, a sequence-specific binding polypeptide and/or domain from, for example, a polynucleotide-guided endonuclease, a CRISPR-Cas effector protein (e.g., a CRISPR-Cas endonuclease), a zinc finger nuclease, a transcription activator-like effector nuclease (TALEN) and/or an Argonaute protein. In some embodiments, a nucleic acid binding polypeptide comprises a cleavage polypeptide (e.g., a nuclease polypeptide and/or domain) such as, but not limited to, an endonuclease (e.g., Fok1), a polynucleotide-guided endonuclease, a CRISPR-Cas endonuclease, a zinc finger nuclease, and/or a transcription activator-like effector nuclease (TALEN). In some embodiments, the nucleic acid binding polypeptide associates with and/or is capable of associating with (e.g., forms a complex with) one or more nucleic acid molecule(s) (e.g., forms a complex with a guide nucleic acid as described herein) that can direct or guide the nucleic acid binding polypeptide to a specific target nucleotide sequence (e.g., a gene locus of a genome) that is complementary to the one or more nucleic acid molecule(s) (or a portion or region thereof), thereby causing the nucleic acid binding polypeptide to bind to the nucleotide sequence at the specific target site. In some embodiments, the nucleic acid binding polypeptide is a CRISPR-Cas effector protein as described herein. In some embodiments, reference is made to specifically to a CRISPR-Cas effector protein for simplicity, but a nucleic acid binding polypeptide as described herein may be used. In some embodiments, a polynucleotide and/or a nucleic acid construct of the invention can be an “expression cassette” or can be comprised within an expression cassette. As used herein, “expression cassette” means a recombinant nucleic acid molecule comprising, for example, a nucleic acid construct of the invention (e.g., a polynucleotide encoding a nucleic acid binding polypeptide (e.g., a CRISPR-Cas effector protein), a polynucleotide encoding an Agrobacterium effector protein, a polynucleotide encoding a DNA dependent polymerase polypeptide or domain thereof, and/or a polynucleotide encoding a 5′-3′ exonuclease polypeptide or domain thereof, and/or a guide nucleic acid), wherein nucleic acid construct is/are operably associated with one or more control sequences (e.g., a promoter, terminator and the like). Thus, in some embodiments, one or more expression cassettes may be provided, which are designed to express, for example, a nucleic acid construct of the invention (e.g., a nucleic acid construct of the invention encoding a nucleic acid binding polypeptide, an Agrobacterium effector protein, a DNA dependent DNA polymerase polypeptide or domain thereof, and/or 5′-3′ exonuclease polypeptide or domain thereof, and the like, or comprising a T-DNA sequence, and/or a guide nucleic acid, and the like). When an expression cassette of the present invention comprises more than one polynucleotide, the polynucleotides may be operably linked to a single promoter that drives expression of all of the polynucleotides or the polynucleotides may be operably linked to one or more separate promoters (e.g., three polynucleotides may be driven by one, two or three promoters in any combination), which may be the same or different from each other. When two or more separate promoters are used, the promoters may be the same promoter or they may be different promoters. Thus, a polynucleotide encoding a sequence nucleic binding domain, a polynucleotide encoding an Agrobacterium effector protein, a polynucleotide encoding a DNA dependent polymerase polypeptide or domain thereof, and/or a polynucleotide encoding a 5′-3′ exonuclease polypeptide or domain thereof, a T-DNA sequence, and/or a guide nucleic acid when comprised in a single expression cassette may each be operably linked to a single promoter, or separate promoters in any combination.

[0096] In some embodiments, an expression cassette comprising the polynucleotides/nucleic acid constructs of the invention may be optimized for expression in an organism (e.g., an animal, a plant, a bacterium and the like).

[0097] An expression cassette comprising a nucleic acid construct of the invention may be chimeric, meaning that at least one of its components is heterologous with respect to at least one of its other components (e.g., a promoter from the host organism operably linked to a polynucleotide of interest to be expressed in the host organism, wherein the polynucleotide of interest is from a different organism than the host or is not normally found in association with that promoter). An expression cassette may also be one that is naturally occurring but has been obtained in a recombinant form useful for heterologous expression.

[0098] An expression cassette can optionally include a transcriptional and/or translational termination region (i.e., termination region) and/or an enhancer region that is functional in the selected host cell. A variety of transcriptional terminators and enhancers are known in the art and are available for use in expression cassettes. Transcriptional terminators are responsible for the termination of transcription and correct mRNA polyadenylation. A termination region and/or the enhancer region may be native to the transcriptional initiation region, may be native to, for example, a gene encoding a nucleic acid binding protein, a gene encoding a DNA-dependent DNA polymerase, a gene encoding a domain is capable of interacting with a T-DNA sequence, and the like, or may be native to a host cell, or may be native to another source (e.g., foreign or heterologous to the promoter, to a gene encoding a nucleic acid binding protein, a gene encoding a DNA-dependent DNA polymerase, a gene encoding a domain is capable of interacting with a T-DNA sequence, and the like, or to the host cell, or any combination thereof).

[0099] An expression cassette of the invention also can include a polynucleotide encoding a selectable marker, which can be used to select a transformed host cell. As used herein, “selectable marker” means a polynucleotide sequence that when expressed imparts a distinct phenotype to the host cell expressing the marker and thus allows such transformed cells to be distinguished from those that do not have the marker. Such a polynucleotide sequence may encode either a selectable or screenable marker, depending on whether the marker confers a trait that can be selected for by chemical means, such as by using a selective agent (e.g., an antibiotic and the like), or on whether the marker is simply a trait that one can identify through observation or testing, such as by screening (e.g., fluorescence). Many examples of suitable selectable markers are known in the art and can be used in the expression cassettes described herein.

[0100] The expression cassettes, the nucleic acid molecules/constructs and polynucleotide sequences described herein can be used in connection with vectors. The term “vector” refers to a composition for transferring, delivering or introducing a nucleic acid (or nucleic acids) into a cell. A vector comprises a nucleic acid construct (e.g., expression cassette(s)) comprising the nucleotide sequence(s) to be transferred, delivered or introduced. Vectors for use in transformation of host organisms are well known in the art. Non-limiting examples of general classes of vectors include viral vectors, plasmid vectors, phage vectors, phagemid vectors, cosmid vectors, fosmid vectors, bacteriophages, artificial chromosomes, minicircles, or Agrobacterium binary vectors in double or single stranded linear or circular form which may or may not be self transmissible or mobilizable. In some embodiments, a viral vector can include, but is not limited, to a retroviral, lentiviral, adenoviral, adeno-associated, or herpes simplex viral vector. A vector as defined herein can transform a prokaryotic or eukaryotic host either by integration into the cellular genome or exist extrachromosomally (e.g. autonomous replicating plasmid with an origin of replication). Additionally included are shuttle vectors by which is meant a DNA vehicle capable, naturally or by design, of replication in two different host organisms, which may be selected from actinomycetes and related species, bacteria and eukaryotic (e.g. higher plant, mammalian, yeast or fungal cells). In some embodiments, the nucleic acid in the vector is under the control of, and operably linked to, an appropriate promoter or other regulatory elements for transcription in a host cell. The vector may be a bi-functional expression vector which functions in multiple hosts. In the case of genomic DNA, this may contain its own promoter and/or other regulatory elements and in the case of cDNA this may be under the control of an appropriate promoter and/or other regulatory elements for expression in the host cell. Accordingly, a nucleic acid construct of this invention and/or expression cassettes comprising the same may be comprised in vectors as described herein and as known in the art.

[0101] As used herein, “contact,” “contacting,” “contacted,” and grammatical variations thereof, refer to placing the components of a desired reaction together under conditions suitable for carrying out the desired reaction (e.g., transformation, transcriptional control, genome editing, nicking, and/or cleavage). Thus, for example, a target nucleic acid may be contacted with a nucleic acid construct of the invention encoding, for example, a nucleic acid binding polypeptide (e.g., a DNA binding domain such as a sequence-specific DNA binding protein (e.g., a polynucleotide-guided endonuclease, a CRISPR-Cas effector protein (e.g., CRISPR-Cas endonuclease), a zinc finger effector protein, meganuclease, and/or a transcription activator-like effector (TALE) protein (e.g., a TALE nuclease (TALEN), and/or an Argonaute protein) and a DNA-dependent DNA polymerase and/or a T-DNA sequence or a nucleic acid construct encoding the same, under conditions whereby the nucleic acid binding protein and the DNA-dependent DNA polymerase are expressed and the nucleic acid binding protein binds to the target nucleic acid, and the DNA-dependent DNA polymerase is either fused to the nucleic acid binding protein or is recruited to the nucleic acid binding protein (via, for example, a peptide tag fused to the nucleic acid binding protein and an affinity tag fused to the DNA-dependent DNA polymerase) and thus, the DNA-dependent DNA polymerase is positioned in the vicinity of the target nucleic acid, thereby modifying the target nucleic acid. Other methods for recruiting a DNA-dependent DNA polymerase may be used that take advantage of other protein-protein interactions, and also RNA-protein interactions and chemical interactions may be used. As another example, the constructs of the invention may be engineered into an Agrobacterium cell (e.g., such that they are expressed in an Agrobacterium cell and/or present in a plasmid and/or T-DNA that is in an Agrobacterium cell) and a plant cell may be contacted with the engineered Agrobacterium cell, wherein the plant cell is infected/transformed with the Agrobacterium, thereby modifying a target nucleic acid of the plant cell. In some embodiments, a nucleic acid binding protein (e.g., a CRISPR-Cas effector protein), a guide nucleic acid, and an Agrobacterium effector protein contact a target nucleic acid to thereby modify the nucleic acid. In some embodiments, a nucleic acid binding protein (e.g., a CRISPR-Cas effector protein), a guide nucleic acid, an Agrobacterium effector protein, a DNA-dependent DNA polymerase, and optionally a T-DNA contact a target nucleic acid to thereby modify the nucleic acid. In some embodiments, the nucleic acid binding protein, a guide nucleic acid, and/or an Agrobacterium effector protein may be in the form of a complex (e.g., a ribonucleoprotein such as an assembled ribonucleoprotein complex) and the complex contacts the target nucleic acid. In some embodiments, the complex or a component thereof (e.g., the guide nucleic acid) hybridizes to the target nucleic acid and thereby the target nucleic acid is modified (e.g., via action of the nucleic acid binding protein such as a CRISPR-Cas effector protein). In some embodiments, the Agrobacterium effector protein, DNA-dependent DNA polymerase, T-DNA, and/or nucleic acid binding polypeptide localize at the target nucleic acid, optionally through covalent and/or non-covalent interactions.

[0102] As used herein, “modifying” or “modification” in reference to a target nucleic acid includes editing (e.g., mutating), covalent modification, exchanging/substituting nucleic acids/nucleotide bases, deleting, cleaving, nicking, and/or transcriptional control of a target nucleic acid to thereby provide a modified nucleic acid. In some embodiments, a modification may include an insertion and/or deletion of any size and/or a single base change (SNP) of any type. In some embodiments, a modification comprises a SNP. In some embodiments, a modification comprises exchanging and/or substituting one or more (e.g., 1, 2, 3, 4, 5, or more) nucleotides. In some embodiments, an insertion or deletion may be about 1 base to about 30,000 bases in length (e.g., about 1, 2, 3, 4, 5, 6, 7, 8, 9, 10, 11, 12, 13, 14, 15, 16, 17, 18, 19, 20, 21, 22, 23, 24, 25, 26, 27, 28, 29, 30, 31, 32, 33, 34, 35, 36, 37, 38, 39, 40, 41, 42, 43, 44, 45, 46, 47, 48, 49, 50, 51, 52, 53, 54, 55, 56, 57, 58, 59, 60, 61, 62, 63, 64, 65, 66, 67, 68, 69, 70, 71, 72, 73, 74, 75, 76, 77, 78, 79, 80, 81, 82, 83, 84, 85, 86, 87, 88, 89, 90, 91, 92, 93, 94, 95, 96, 97, 98, 99, 100, 110, 120, 130, 140, 150, 160, 170, 180, 190, 200, 210, 220, 230, 240, 250, 260, 270, 280, 290, 300, 310, 320, 330, 340, 350, 360, 370, 380, 390, 400, 410, 400, 410, 420, 430, 440, 450, 460, 470, 480, 490, 500, 510, 520, 530, 540, 550, 560, 570, 580, 590, 600, 610, 620, 630, 640, 650, 660, 670, 680, 690, 700, 710, 720, 730, 740, 750, 760, 770, 780, 790, 800, 810, 820, 830, 840, 850, 860, 870, 880, 890, 900, 910, 920, 930, 940, 950, 960, 970, 980, 990, 1000, 1100, 1200, 1300, 1400, 1500, 1600, 1700, 1800, 1900, 2000, 2500, 3000, 3500, 4000, 4500, 5000, 5500, 6000, 6500, 7000, 7500, 8000, 8500, 9000, 9500, 10,000, 10,500, 11,000, 11,500, 12,000, 12,500, 13,000, 13,500, 14,000, 14,500, 15,000, 15,500, 16,000, 16,500, 17,000, 17,500, 18,000, 18,500, 19,000, 19,500, 20,000, 20,500, 21,000, 21,500, 22,000, 22,500, 23,000, 23,500, 24,000, 24,500, 25,000, 25,500, 26,000, 26,500, 27,000, 27,500, 28,000, 28,500, 29,000, 29,500, 30,000 bases in length or more, or any value or range therein). Thus, in some embodiments, an insertion or deletion may be about 1, 2, 3, 4, 5, 6, 7, 8, 9, 10, 11, 12, 13, 14, 15, 16, 17, 18, 19, 20, 21, 22, 23, 24, 25, 26, 27, 28, 29, 30, 31, 32, 33, 34, 35, 36, 37, 38, 39, 40, 41, 42, 43, 44, 45, 46, 47, 48, 49, 50, 51, 52, 53, 54, 55, 56, 57, 58, 59, 60, 61, 62, 63, 64, 65, 66, 67, 68, 69, 70, 71, 72, 73, 74, 75, 76, 77, 78, 79, 80, 81, 82, 83, 84, 85, 86, 87, 88, 89, 90, 91, 92, 93, 94, 95, 96, 97, 98, 99, 100, 110, 120, 130, 140, 150, 160, 170, 180, 190, 200, 210, 220, 230, 240, 250, 260, 270, 280, 290, 300 to about 310, 320, 330, 340, 350, 360, 370, 380, 390, 400, 410, 420, 430, 440, 450, 460, 470, 480, 490, 500, 510, 520, 530, 540, 550, 560, 570, 580, 590, 600, 610, 620, 630, 640, 650, 660, 670, 680, 690, 700, 710, 720, 730, 740, 750, 760, 770, 780, 790, 800, 810, 820, 830, 840, 850, 860, 870, 880, 890, 900, 910, 920, 930, 940, 950, 960, 970, 980, 990, 1000 bases in length, or any range or value therein; about 50, 51, 52, 53, 54, 55, 56, 57, 58, 59, 60, 61, 62, 63, 64, 65, 66, 67, 68, 69, 70, 71, 72, 73, 74, 75, 76, 77, 78, 79, 80, 81, 82, 83, 84, 85, 86, 87, 88, 89, 90, 91, 92, 93, 94, 95, 96, 97, 98, 99, 100, 110, 120, 130, 140, 150, 160, 170, 180, 190, 200, 210, 220, 230, 240, 250, 260, 270, 280, 290, 300 bases to about 310, 320, 330, 340, 350, 360, 370, 380, 390, 400, 410, 420, 430, 440, 450, 460, 470, 480, 490, 500, 510, 520, 530, 540, 550, 560, 570, 580, 590, 600, 610, 620, 630, 640, 650, 660, 670, 680, 690, 700, 710, 720, 730, 740, 750, 760, 770, 780, 790, 800, 810, 820, 830, 840, 850, 860, 870, 880, 890, 900, 910, 920, 930, 940, 950, 960, 970, 980, 990, 1000, 1100, 1200, 1300, 1400, 1500, 1600, 1700, 1800, 1900, 2000 bases or more in length, or any value or range therein; about 500, 510, 520, 530, 540, 550, 560, 570, 580, 590, 600, 610, 620, 630, 640, 650, 660, 670, 680, 690, 700, 710, 720, 730, 740, 750, 760, 770, 780, 790, 800, 810, 820, 830, 840, 850, 860, 870, 880, 890, 900, 910, 920, 930, 940, 950, 960, 970, 980, 990, 1000, 1100, 1200, 1300, 1400, 1500, 1600, 1700, 1800, 1900, 2000 bases to about 2500, 3000, 3500, 4000, 4500, 5000, 5500, 6000, 6500, 7000, 7500, 8000, 8500, 9000, 9500, or 10,000 bases or more in length, or any value or range therein; or about 400, 410, 420, 430, 440, 450, 460, 470, 480, 490, 500, 510, 520, 530, 540, 550, 560, 570, 580, 590, 600, 610, 620, 630, 640, 650, 660, 670, 680, 690, or 700 bases to about 710, 720, 730, 740, 750, 760, 770, 780, 790, 800, 810, 820, 830, 840, 850, 860, 870, 880, 890, 900, 910, 920, 930, 940, 950, 960, 970, 980, 990, 1000, 1100, 1200, 1300, 1400, 1500, 1600, 1700, 1800, 1900, 2000, 2500, 3000, 3500, 4000, 4500, or 5000 bases or more in length, or any value or range therein. In some embodiments, an insertion or deletion may be about 1000, 1100, 1200, 1300, 1400, 1500, 1600, 1700, 1800, 1900, 2000, 2500, 3000, 3500, 4000, 4500, 5000, 5500, 6000, 6500, 7000, 7500, 8000, 8500, 9000, 9500, or 10,000 bases to about 10,500, 11,000, 11,500, 12,000, 12,500, 13,000, 13,500, 14,000, 14,500, 15,000, 15,500, 16,000, 16,500, 17,000, 17,500, 18,000, 18,500, 19,000, 19,500, 20,000, 20,500, 21,000, 21,500, 22,000, 22,500, 23,000, 23,500, 24,000, 24,500, 25,000, 25,500, 26,000, 26,500, 27,000, 27,500, 28,000, 28,500, 29,000, 29,500, or 30,000 bases or more in length, or any value or range therein.

[0103] In some embodiments, a nucleic acid construct of the invention (e.g., a polynucleotide encoding a CRISPR-Cas effector protein, a polynucleotide encoding a fusion protein of the present invention, and/or a guide nucleic acid and/or expression cassettes and/or vectors comprising the same) may be operably linked to at least one regulatory sequence, optionally, wherein the at least one regulatory sequence may be codon optimized for expression in a plant. In some embodiments, the at least one regulatory sequence may be, for example, a promoter, an operon, a terminator, or an enhancer. In some embodiments, the at least one regulatory sequence may be a promoter. In some embodiments, the regulatory sequence may be an intron. In some embodiments, the at least one regulatory sequence may be, for example, a promoter operably associated with an intron or a promoter region comprising an intron. In some embodiments, the at least one regulatory sequence may be, for example a ubiquitin promoter and its associated intron (e.g., Medicago truncatula and/or Zea mays and their associated introns). In some embodiments, the at least one regulatory sequence may be a terminator nucleotide sequence and/or an enhancer nucleotide sequence.

[0104] In some embodiments, a nucleic acid construct of the invention may be operably associated with a promoter region, wherein the promoter region comprises an intron, optionally wherein the promoter region may be a ubiquitin promoter and intron (e.g., a Medicago or a maize ubiquitin promoter and intron, e.g., SEQ ID NO:1 or SEQ ID NO:2). In some embodiments, the nucleic acid construct of the invention that is operably associated with a promoter region comprising an intron may be codon optimized for expression in a plant.

[0105] In some embodiments, a nucleic acid construct of the invention may encode one or more polypeptides of interest, optionally wherein the one or more polypeptides of interest may be codon optimized for expression in a plant.

[0106] As used herein, a “CRISPR-Cas effector protein” is a protein or polypeptide or domain thereof that cleaves, cuts, or nicks a nucleic acid, binds a nucleic acid (e.g., a target nucleic acid and/or a guide nucleic acid), and/or that identifies, recognizes, or binds a guide nucleic acid as defined herein. In some embodiments, a CRISPR-Cas effector protein may be an enzyme (e.g., a nuclease, endonuclease, nickase, etc.) or portion thereof and/or may function as an enzyme. In some embodiments, a CRISPR-Cas effector protein refers to a CRISPR-Cas nuclease polypeptide or domain thereof that comprises nuclease activity or in which the nuclease activity has been reduced or eliminated, and/or comprises nickase activity or in which the nickase has been reduced or eliminated, and/or comprises single stranded DNA cleavage activity (ss DNAse activity) or in which the ss DNAse activity has been reduced or eliminated, and/or comprises self-processing RNAse activity or in which the self-processing RNAse activity has been reduced or eliminated. A CRISPR-Cas effector protein may bind to a target nucleic acid. A CRISPR-Cas effector protein may be a Type I, II, III, IV, V, or VI CRISPR-Cas effector protein. In some embodiments, a CRISPR-Cas effector protein may be from a Type I CRISPR-Cas system, a Type II CRISPR-Cas system, a Type III CRISPR-Cas system, a Type IV CRISPR-Cas system, Type V CRISPR-Cas system, or a Type VI CRISPR-Cas system. In some embodiments, a CRISPR-Cas effector protein of the invention may be from a Type II CRISPR-Cas system or a Type V CRISPR-Cas system. In some embodiments, a CRISPR-Cas effector protein may be a Type II CRISPR-Cas effector protein, for example, a Cas9 effector protein. In some embodiments, a CRISPR-Cas effector protein may be Type V CRISPR-Cas effector protein, for example, a Cas12 effector protein. In some embodiments, a CRISPR-Cas effector protein may be devoid of a nuclear localization signal (NLS).

[0107] In some embodiments, a CRISPR-Cas effector protein may be or include, but is not limited to, a Cas9, C2c1, C2c3, Cas12a (also referred to as Cpf1), Cas12b, Cas12c, Cas12d, Cas12e, Cas13a, Cas13b, Cas13c, Cas13d, Cas1, Cas1B, Cas2, Cas3, Cas3′, Cas3″, Cas4, Cas5, Cas6, Cas7, Cas8, Cas9 (also known as Csn1 and Csx12), Cas10, Csy1, Csy2, Csy3, Cse1, Cse2, Csc1, Csc2, Csa5, Csn2, Csm2, Csm3, Csm4, Csm5, Csm6, Cmr1, Cmr3, Cmr4, Cmr5, Cmr6, Csb1, Csb2, Csb3, Csx17, Csx14, Csx10, Csx16, CsaX, Csx3, Csx1, Csx15, Csf1, Csf2, Csf3, Csf4 (dinG), and/or Csf5 nuclease, optionally wherein the CRISPR-Cas effector protein may be a Cas9, Cas12a (Cpf1), Cas12b, Cas12c (C2c3), Cas12d (CasY), Cas12e (CasX), Cas12g, Cas12h, Cas12i, C2c4, C2c5, C2c8, C2c9, C2c10, Cas14a, Cas14b, and/or Cas14c effector protein.

[0108] In some embodiments, a CRISPR-Cas effector protein useful with the invention may comprise a mutation in its nuclease active site (e.g., RuvC, HNH, e.g., RuvC site of a Cas12a nuclease domain; e.g., RuvC site and/or HNH site of a Cas9 nuclease domain). A CRISPR-Cas effector protein having a mutation in its nuclease active site, and therefore, no longer comprising nuclease activity, is commonly referred to as “dead,” e.g., dCas9. In some embodiments, a CRISPR-Cas effector protein domain or polypeptide having a mutation in its nuclease active site may have impaired activity or reduced activity as compared to the same CRISPR-Cas effector protein without the mutation, e.g., a nickase, e.g, Cas9 nickase, Cas12a nickase.

[0109] A CRISPR Cas9 effector protein or CRISPR Cas9 effector domain useful with this invention may be any known or later identified Cas9 nuclease. In some embodiments, a CRISPR Cas9 polypeptide can be a Cas9 polypeptide from, for example, Streptococcus spp. (e.g., S. pyogenes, S. thermophilus), Lactobacillus spp., Bifidobacterium spp., Kandleria spp., Leuconostoc spp., Oenococcus spp., Pediococcus spp., Weissella spp., and/or Olsenella spp. In some embodiments, a CRISPR-Cas effector protein may be a Cas9 polypeptide or domain thereof and optionally may have a nucleotide sequence of any one of SEQ ID NOs:3-13 or SEQ ID NOs:221-224 and/or an amino acid sequence of any one of SEQ ID NOs:14-15.

[0110] In some embodiments, the CRISPR-Cas effector protein may be a Cas9 polypeptide derived from Streptococcus pyogenes and recognizes the PAM sequence motif NGG, NAG, NGA (Mali et al, Science 2013; 339(6121): 823-826). In some embodiments, the CRISPR-Cas effector protein may be a Cas9 polypeptide derived from Streptococcus thermophiles and recognizes the PAM sequence motif NGGNG and/or NNAGAAW (W=A or T) (See, e.g., Horvath et al, Science, 2010; 327(5962): 167-170, and Deveau et al, J Bacteriol 2008; 190(4): 1390-1400). In some embodiments, the CRISPR-Cas effector protein may be a Cas9 polypeptide derived from Streptococcus mutans and recognizes the PAM sequence motif NGG and/or NAAR (R=A or G) (See, e.g., Deveau et al, J BACTERIOL 2008; 190(4): 1390-1400). In some embodiments, the CRISPR-Cas effector protein may be a Cas9 polypeptide derived from Streptococcus aureus and recognizes the PAM sequence motif NNGRR (R=A or G). In some embodiments, the CRISPR-Cas effector protein may be a Cas9 protein derived from S. aureus, which recognizes the PAM sequence motif N GRRT (R=A or G). In some embodiments, the CRISPR-Cas effector protein may be a Cas9 polypeptide derived from S. aureus, which recognizes the PAM sequence motif N GRRV (R=A or G). In some embodiments, the CRISPR-Cas effector protein may be a Cas9 polypeptide that is derived from Neisseria meningitidis and recognizes the PAM sequence motif N GATT or N GCTT (R=A or G, V=A, G or C) (See, e.g., Hou et ah, PNAS 2013, 1-6). In the aforementioned embodiments, N can be any nucleotide residue, e.g., any of A, G, C or T. In some embodiments, the CRISPR-Cas effector protein may be a Cas13a protein derived from Leptotrichia shahii, which recognizes a protospacer flanking sequence (PFS) (or RNA PAM (rPAM)) sequence motif of a single 3′ A, U, or C, which may be located within the target nucleic acid.

[0111] A Type V CRISPR-Cas effector protein useful with embodiments of the invention may be any Type V CRISPR-Cas nuclease. A Type V CRISPR-Cas nuclease useful with this invention as an effector protein can include, but is not limited, to Cas12a (Cpf1), Cas12b, Cas12c (C2c3), Cas12d (CasY), Cas12e (CasX), Cas12g, Cas12h, Cas12i, C2c1, C2c4, C2c5, C2c8, C2c9, C2c10, Cas14a, Cas14b, and/or Cas14c nuclease. In some embodiments, a Type V CRISPR-Cas nuclease polypeptide or domain useful with embodiments of the invention may be a Cas12a polypeptide or domain. In some embodiments, a Type V CRISPR-Cas effector protein or domain useful with embodiments of the invention may be a nickase, optionally, a Cas12a nickase. In some embodiments, a CRISPR-Cas effector protein may be a Cas12a polypeptide or domain thereof and optionally may have an amino acid sequence of any one of SEQ ID NOs:16-32 and/or a nucleotide sequence of any one of SEQ ID NOs:33-35. In some embodiments, the CRISPR-Cas effector protein may be derived from Cas12a, which is a Type V Clustered Regularly Interspaced Short Palindromic Repeats (CRISPR)-Cas nuclease. Cas12a differs in several respects from the more well-known Type II CRISPR Cas9 nuclease. For example, Cas9 recognizes a G-rich protospacer-adjacent motif (PAM) that is 3′ to its guide RNA (gRNA, sgRNA, crRNA, crDNA, CRISPR array) binding site (protospacer, target nucleic acid, target DNA) (3′-NGG), while Cas12a recognizes a T-rich PAM that is located 5′ to the target nucleic acid (5′-TTN, 5′-TTTN. In fact, the orientations in which Cas9 and Cas12a bind their guide RNAs are very nearly reversed in relation to their N and C termini. Furthermore, Cas12a enzymes use a single guide RNA (gRNA, CRISPR array, crRNA) rather than the dual guide RNA (sgRNA (e.g., crRNA and tracrRNA)) found in natural Cas9 systems, and Cas12a processes its own gRNAs. Additionally, Cas12a nuclease activity produces staggered DNA double stranded breaks instead of blunt ends produced by Cas9 nuclease activity, and Cas12a relies on a single RuvC domain to cleave both DNA strands, whereas Cas9 utilizes an HNH domain and a RuvC domain for cleavage.

[0112] A CRISPR Cas12a effector protein/domain useful with this invention may be any known or later identified Cas12a polypeptide (previously known as Cpf1) (see, e.g., U.S. Pat. No. 9,790,490, which is incorporated by reference for its disclosures of Cpf1 (Cas12a) sequences). The term “Cas12a”, “Cas12a polypeptide” or “Cas12a domain” refers to an RNA-guided nuclease comprising a Cas12a polypeptide, or a fragment thereof, which comprises the guide nucleic acid binding domain of Cas12a and/or an active, inactive, or partially active DNA cleavage domain of Cas12a. In some embodiments, a Cas12a useful with the invention may comprise a mutation in the nuclease active site (e.g., RuvC site of the Cas12a domain). A Cas12a domain or Cas12a polypeptide having a mutation in its nuclease active site, and therefore, no longer comprising nuclease activity, is commonly referred to as deadCas12a (e.g., dCas12a). In some embodiments, a Cas12a domain or Cas12a polypeptide having a mutation in its nuclease active site may have impaired activity, e.g., may have nickase activity.

[0113] In some embodiments, a CRISPR-Cas effector protein may be optimized for expression in an organism, for example, in an animal, a plant, a fungus, an archaeon, or a bacterium. In some embodiments, a CRISPR-Cas effector protein (e.g., Cas12a polypeptide/domain or a Cas9 polypeptide/domain) may be optimized for expression in a plant and/or for expression in an Agrobacterium strain.

[0114] A “guide nucleic acid,” “guide RNA,” “gRNA,” “CRISPR RNA/DNA,” “CRISPR guide nucleic acid,” “crRNA” or “crDNA” as used herein means a nucleic acid that comprises at least one spacer sequence, which is complementary to (and hybridizes to) a target DNA (e.g., protospacer), and at least one repeat sequence (e.g., a repeat of a Type V Cas12a CRISPR-Cas system, or a fragment or portion thereof; a repeat of a Type II Cas9 CRISPR-Cas system, or fragment thereof; a repeat of a Type V C2c1 CRISPR Cas system, or a fragment thereof; a repeat of a CRISPR-Cas system of, for example, C2c3, Cas12a (also referred to as Cpf1), Cas12b, Cas12c, Cas12d, Cas12e, Cas13a, Cas13b, Cas13c, Cas13d, Cas1, Cas1B, Cas2, Cas3, Cas3′, Cas3″, Cas4, Cas5, Cas6, Cas7, Cas8, Cas9 (also known as Csn1 and Csx12), Cas10, Csy1, Csy2, Csy3, Cse1, Cse2, Csc1, Csc2, Csa5, Csn2, Csm2, Csm3, Csm4, Csm5, Csm6, Cmr1, Cmr3, Cmr4, Cmr5, Cmr6, Csb1, Csb2, Csb3, Csx17, Csx14, Csx10, Csx16, CsaX, Csx3, Csx1, Csx15, Csf1, Csf2, Csf3, Csf4 (dinG), and/or Csf5, or a fragment thereof), wherein the repeat sequence may be linked to the 5′ end and/or the 3′ end of the spacer sequence. In some embodiments, the guide nucleic acid comprises DNA. In some embodiments, the guide nucleic acid comprises RNA. The design of a gRNA of this invention may be based on a Type I, Type II, Type III, Type IV, Type V, or Type VI CRISPR-Cas system.

[0115] In some embodiments, a Cas12a gRNA may comprise, from 5′ to 3′, a repeat sequence (full length or portion thereof (“handle”); e.g., pseudoknot-like structure) and a spacer sequence.

[0116] In some embodiments, a guide nucleic acid may comprise more than one repeat sequence-spacer sequence (e.g., 2, 3, 4, 5, 6, 7, 8, 9, 10, or more repeat-spacer sequences) (e.g., repeat-spacer-repeat, e.g., repeat-spacer-repeat-spacer-repeat-spacer-repeat-spacer-repeat-spacer, and the like). The guide nucleic acids of this invention are synthetic, human-made and not found in nature. A gRNA can be quite long and may be used as an aptamer (like in the MS2 recruitment strategy) or other RNA structures hanging off the spacer.

[0117] A “repeat sequence” as used herein, refers to, for example, any repeat sequence of a wild-type CRISPR Cas locus (e.g., a Cas9 locus, a Cas12a locus, a C2c1 locus, etc.) or a repeat sequence of a synthetic crRNA that is functional with the CRISPR-Cas effector protein encoded by the nucleic acid constructs of the invention. A repeat sequence useful with this invention can be any known or later identified repeat sequence of a CRISPR-Cas locus (e.g., Type I, Type II, Type III, Type IV, Type V or Type VI) or it can be a synthetic repeat designed to function in a Type I, II, III, IV, V or VI CRISPR-Cas system. A repeat sequence may comprise a hairpin structure and/or a stem loop structure. In some embodiments, a repeat sequence may form a pseudoknot-like structure at its 5′ end (i.e., “handle”). Thus, in some embodiments, a repeat sequence can be identical to or substantially identical to a repeat sequence from wild-type Type I CRISPR-Cas loci, Type II, CRISPR-Cas loci, Type III, CRISPR-Cas loci, Type IV CRISPR-Cas loci, Type V CRISPR-Cas loci and/or Type VI CRISPR-Cas loci. A repeat sequence from a wild-type CRISPR-Cas locus may be determined through established algorithms, such as using the CRISPRfinder offered through CRISPRdb (see, Grissa et al. Nucleic Acids Res. 35(Web Server issue):W52-7). In some embodiments, a repeat sequence or portion thereof is linked at its 3′ end to the 5′ end of a spacer sequence, thereby forming a repeat-spacer sequence (e.g., guide nucleic acid, guide RNA/DNA, crRNA, crDNA).

[0118] In some embodiments, a repeat sequence comprises, consists essentially of, or consists of at least 10 nucleotides depending on the particular repeat and whether the guide nucleic acid comprising the repeat is processed or unprocessed (e.g., about 10, 11, 12, 13, 14, 15, 16, 17, 18, 19, 20, 21, 22, 23, 24, 25, 26, 27, 28, 29, 30, 31, 32, 33, 34, 35, 36, 37, 38, 39, 40, 41, 42, 43, 44, 45, 46, 47, 48, 49, 50 to 100 or more nucleotides, or any range or value therein; e.g., about). In some embodiments, a repeat sequence comprises, consists essentially of, or consists of about 10 to about 20, about 10 to about 30, about 10 to about 45, about 10 to about 50, about 15 to about 30, about 15 to about 40, about 15 to about 45, about 15 to about 50, about 20 to about 30, about 20 to about 40, about 20 to about 50, about 30 to about 40, about 40 to about 80, about 50 to about 100 or more nucleotides.

[0119] A repeat sequence linked to the 5′ end of a spacer sequence can comprise a portion of a repeat sequence (e.g., 5, 6, 7, 8, 9, 10, 11, 12, 13, 14, 15, 16, 17, 18, 19, 20, 21, 22, 23, 24, 25, 26, 27, 28, 29, 30, 31, 32, 33, 34, 35 or more contiguous nucleotides of a wild type repeat sequence). In some embodiments, a portion of a repeat sequence linked to the 5′ end of a spacer sequence can be about five to about ten consecutive nucleotides in length (e.g., about 5, 6, 7, 8, 9, 10 nucleotides) and have at least 90% sequence identity (e.g., at least about 90%, 91%, 92%, 93%, 94%, 95%, 96%, 97%, 98%, 99%, or more) to the same region (e.g., 5′ end) of a wild type CRISPR Cas repeat nucleotide sequence. In some embodiments, a portion of a repeat sequence may comprise a pseudoknot-like structure at its 5′ end (e.g., “handle”).

[0120] A “spacer sequence” as used herein is a nucleotide sequence that is complementary to a target nucleic acid (e.g., target DNA) (e.g, protospacer). The spacer sequence can be fully complementary or substantially complementary (e.g., at least about 70% complementary (e.g., about 70%, 71%, 72%, 73%, 74%, 75%, 76%, 77%, 78%, 79%, 80%, 81%, 82%, 83%, 84%, 85%, 86%, 87%, 88%, 89%, 90%, 91%, 92%, 93%, 94%, 95%, 96%, 97%, 98%, 99%, or more)) to a target nucleic acid. Thus, in some embodiments, the spacer sequence can have one, two, three, four, or five mismatches as compared to the target nucleic acid, which mismatches can be contiguous or noncontiguous. In some embodiments, the spacer sequence can have 70% complementarity to a target nucleic acid. In other embodiments, the spacer nucleotide sequence can have 80% complementarity to a target nucleic acid. In still other embodiments, the spacer nucleotide sequence can have 85%, 90%, 95%, 96%, 97%, 98%, 99% or 99.5% complementarity, and the like, to the target nucleic acid (protospacer). In some embodiments, the spacer sequence is 100% complementary to the target nucleic acid. A spacer sequence may have a length from about 15 nucleotides to about 30 nucleotides (e.g., 15, 16, 17, 18, 19, 20, 21, 22, 23, 24, 25, 26, 27, 28, 29, or 30 nucleotides, or any range or value therein). Thus, in some embodiments, a spacer sequence may have complete complementarity or substantial complementarity over a region of a target nucleic acid (e.g., protospacer) that is at least about 15 nucleotides to about 30 nucleotides in length. In some embodiments, the spacer is about 20 nucleotides in length. In some embodiments, the spacer is about 21, 22, or 23 nucleotides in length.

[0121] In some embodiments, the 5′ region of a spacer sequence of a guide nucleic acid may be identical to a target DNA, while the 3′ region of the spacer may be substantially complementary to the target DNA (e.g., Type V CRISPR-Cas), or the 3′ region of a spacer sequence of a guide nucleic acid may be identical to a target DNA, while the 5′ region of the spacer may be substantially complementary to the target DNA (e.g., Type II CRISPR-Cas), and therefore, the overall complementarity of the spacer sequence to the target DNA may be less than 100%. Thus, for example, in a guide for a Type V CRISPR-Cas system, the first 1, 2, 3, 4, 5, 6, 7, 8, 9, 10 nucleotides in the 5′ region (i.e., seed region) of, for example, a 20 nucleotide spacer sequence may be 100% complementary to the target DNA, while the remaining nucleotides in the 3′ region of the spacer sequence are substantially complementary (e.g., at least about 70% complementary) to the target DNA. In some embodiments, the first 1 to 8 nucleotides (e.g., the first 1, 2, 3, 4, 5, 6, 7, 8, nucleotides, and any range therein) of the 5′ end of the spacer sequence may be 100% complementary to the target DNA, while the remaining nucleotides in the 3′ region of the spacer sequence are substantially complementary (e.g., at least about 50% complementary (e.g., 50%, 55%, 60%, 65%, 70%, 71%, 72%, 73%, 74%, 75%, 76%, 77%, 78%, 79%, 80%, 81%, 82%, 83%, 84%, 85%, 86%, 87%, 88%, 89%, 90%, 91%, 92%, 93%, 94%, 95%, 96%, 97%, 98%, 99%, or more)) to the target DNA.

[0122] As a further example, in a guide for a Type II CRISPR-Cas system, the first 1, 2, 3, 4, 5, 6, 7, 8, 9, 10 nucleotides in the 3′ region (i.e., seed region) of, for example, a 20 nucleotide spacer sequence may be 100% complementary to the target DNA, while the remaining nucleotides in the 5′ region of the spacer sequence are substantially complementary (e.g., at least about 70% complementary) to the target DNA. In some embodiments, the first 1 to 10 nucleotides (e.g., the first 1, 2, 3, 4, 5, 6, 7, 8, 9, 10 nucleotides, and any range therein) of the 3′ end of the spacer sequence may be 100% complementary to the target DNA, while the remaining nucleotides in the 5′ region of the spacer sequence are substantially complementary (e.g., at least about 50% complementary (e.g., at least about 50%, 55%, 60%, 65%, 70%, 71%, 72%, 73%, 74%, 75%, 76%, 77%, 78%, 79%, 80%, 81%, 82%, 83%, 84%, 85%, 86%, 87%, 88%, 89%, 90%, 91%, 92%, 93%, 94%, 95%, 96%, 97%, 98%, 99%, or more or any range or value therein)) to the target DNA.

[0123] In some embodiments, a seed region of a spacer may be about 8 to about 10 nucleotides in length, about 5 to about 6 nucleotides in length, or about 6 nucleotides in length.

[0124] As used herein, a “target nucleic acid”, “target DNA,” “target nucleotide sequence,” “target region,” or “target region in the genome” refer to a region of an organism's genome that is fully complementary (100% complementary) or substantially complementary (e.g., at least 70% complementary (e.g., 70%, 71%, 72%, 73%, 74%, 75%, 76%, 77%, 78%, 79%, 80%, 81%, 82%, 83%, 84%, 85%, 86%, 87%, 88%, 89%, 90%, 91%, 92%, 93%, 94%, 95%, 96%, 97%, 98%, 99%, or more)) to a spacer sequence in a guide nucleic acid of this invention. A target region useful for a CRISPR-Cas system may be located immediately 3′ (e.g., Type V CRISPR-Cas system) or immediately 5′ (e.g., Type II CRISPR-Cas system) to a PAM sequence in the genome of the organism (e.g., a plant genome). A target region may be selected from any region of at least 15 consecutive nucleotides (e.g., 16, 17, 18, 19, 20, 21, 22, 23, 24, 25, 26, 27, 28, 29, 30 nucleotides, and the like) located immediately adjacent to a PAM sequence.

[0125] A “protospacer sequence” refers to the target double stranded DNA and specifically to the portion of the target DNA (e.g., or target region in the genome) that is fully or substantially complementary (and hybridizes) to the spacer sequence of the CRISPR repeat-spacer sequences (e.g., guide nucleic acids, CRISPR arrays, crRNAs).

[0126] In the case of Type V CRISPR-Cas (e.g., Cas12a) systems and Type II CRISPR-Cas (Cas9) systems, the protospacer sequence is flanked by (e.g., immediately adjacent to) a protospacer adjacent motif (PAM). For Type IV CRISPR-Cas systems, the PAM is located at the 5′ end on the non-target strand and at the 3′ end of the target strand (see below, as an example).

```
5′-NNNNNNNNNNNNNNNNNNN-3′ RNA Spacer (SEQ ID NO: 36)
            ||||||||||||||||||||
3′AAANNNNNNNNNNNNNNNNNNN-5′ Target strand (SEQ ID NO: 37)
    ||||
5′TTTNNNNNNNNNNNNNNNNNNN-3′ Non-target strand (SEQ ID NO: 38)
```

[0127] In the case of Type II CRISPR-Cas (e.g., Cas9) systems, the PAM is located immediately 3′ of the target region. The PAM for Type I CRISPR-Cas systems is located 5′ of the target strand. There is no known PAM for Type III CRISPR-Cas systems. Makarova et al. describes the nomenclature for all the classes, types and subtypes of CRISPR systems (Nature Reviews Microbiology 13:722-736 (2015)). Guide structures and PAMs are described in by R. Barrangou (Genome Biol. 16:247 (2015)).

[0128] Canonical Cas12a PAMs are T rich. In some embodiments, a canonical Cas12a PAM sequence may be 5′-TTN, 5′-TTTN, or 5′-TTTV. In some embodiments, canonical Cas9 (e.g., S. pyogenes) PAMs may be 5′-NGG-3′. In some embodiments, non-canonical PAMs may be used but may be less efficient.

[0129] Additional PAM sequences may be determined by those skilled in the art through established experimental and computational approaches. Thus, for example, experimental approaches include targeting a sequence flanked by all possible nucleotide sequences and identifying sequence members that do not undergo targeting, such as through the transformation of target plasmid DNA (Esvelt et al. 2013. Nat. Methods 10:1116-1121; Jiang et al. 2013. Nat. Biotechnol. 31:233-239). In some aspects, a computational approach can include performing BLAST searches of natural spacers to identify the original target DNA sequences in bacteriophages or plasmids and aligning these sequences to determine conserved sequences adjacent to the target sequence (Briner and Barrangou. 2014. Appl. Environ. Microbiol. 80:994-1001; Mojica et al. 2009. Microbiology 155:733-740).

[0130] “Recruit,” “recruiting” or “recruitment” as used herein refer to attracting one or more polypeptide(s) or polynucleotide(s) to another polypeptide or polynucleotide (e.g., to a particular location in a genome) using protein-protein interactions, nucleic acid-protein interactions (e.g., RNA-protein interactions), and/or chemical interactions. Protein-protein interactions can include, but are not limited to, peptide tags (epitopes, multimerized epitopes) and corresponding affinity polypeptides, RNA recruiting motifs and corresponding affinity polypeptides, and/or chemical interactions. Example chemical interactions that may be useful with polypeptides and polynucleotides for the purpose of recruitment can include, but are not limited to, rapamycin-inducible dimerization of FRB-FKBP; Biotin-streptavidin interaction; SNAP tag (Hussain et al. Curr Pharm Des. 19(30):5437-42 (2013)); Halo tag (Los et al. ACS Chem Biol. 3(6):373-82 (2008)); CLIP tag (Gautier et al. Chemistry & Biology 15:128-136 (2008)); DmrA-DmrC heterodimer induced by a compound (Tak et al. Nat Methods 14(12):1163-1166 (2017)); Bifunctional ligand approaches (fuse two protein-binding chemicals together) (Voβ et al. Curr Opin Chemical Biology 28:194-201 (2015)) (e.g. dihyrofolate reductase (DHFR) (Kopyteck et al. Cell Cehm Biol 7(5):313-321 (2000)).

[0131] A “recruiting motif” as used herein refers to one half of a binding pair that may be used to recruit a compound to which the recruiting motif is bound to another compound that includes the other half of the binding pair (i.e., a “corresponding motif”). The recruiting motif and corresponding motif may bind covalently and/or noncovalently. In some embodiments, a recruiting motif is an RNA recruiting motif (e.g., a RNA recruiting motif that is capable of binding and/or configured to bind an affinity polypeptide), an affinity polypeptide (e.g., an affinity polypeptide that is capable of binding and/or configured to bind an RNA recruiting motif and/or a peptide tag), or a peptide tag (e.g., a peptide tag that is capable of binding and/or configured to bind an affinity polypeptide). For example, when a recruiting motif is an RNA recruiting motif, the corresponding motif for the RNA recruiting motif may be an affinity polypeptide that binds the RNA recruiting motif. A further example is that when a recruiting motif is a peptide tag, the corresponding motif for the peptide tag may be an affinity polypeptide that binds the peptide tag. Thus, a compound (e.g., an Agrobacterium effector protein) comprising a recruiting motif (e.g., an affinity polypeptide) may be recruited to another compound (e.g., a guide nucleic acid) comprising a corresponding motif for the recruiting motif (e.g., an RNA recruiting motif).

[0132] As described herein, a “peptide tag” may be employed to recruit one or more polypeptides. A peptide tag may be any polypeptide that is capable of being bound by a corresponding motif such as an affinity polypeptide. A peptide tag may also be referred to as an “epitope” and when provided in multiple copies, a “multimerized epitope.” Example peptide tags can include, but are not limited to, a GCN4 peptide tag (e.g., Sun-Tag), a c-Myc affinity tag, an HA affinity tag, a His affinity tag, an S affinity tag, a methionine-His affinity tag, an RGD-His affinity tag, a FLAG octapeptide, a strep tag or strep tag II, a V5 tag, and/or a VSV-G epitope. In some embodiments, a peptide tag may also include phosphorylated tyrosines in specific sequence contexts recognized by SH2 domains, characteristic consensus sequences containing phosphoserines recognized by 14-3-3 proteins, proline rich peptide motifs recognized by SH3 domains, PDZ protein interaction domains or the PDZ signal sequences, and an AGO hook motif from plants. Peptide tags are disclosed in WO2018/136783 and U.S. Patent Application Publication No. 2017/0219596, which are incorporated by reference for their disclosures of peptide tags. Peptide tags that may be useful with this invention can include, but are not limited to, SEQ ID NO:39 and SEQ ID NO:40. An affinity polypeptide useful with peptide tags includes, but is not limited to, SEQ ID NO:41.

[0133] Any epitope that may be linked to a polypeptide and for which there is a corresponding affinity polypeptide that may be linked to another polypeptide may be used with this invention as a peptide tag. In some embodiments, a peptide tag may comprise 1 or 2 or more copies of a peptide tag (e.g., repeat unit, multimerized epitope (e.g., tandem repeats)) (e.g., 1, 2, 3, 4, 5, 6, 7, 8, 9, 10, 11, 12, 13, 14, 15, 16, 17, 18, 19, 20, 21, 22, 23, 24, 25 or more repeat units. In some embodiments, an affinity polypeptide that interacts with/binds to a peptide tag may be an antibody. In some embodiments, the antibody may be a scFv antibody. In some embodiments, an affinity polypeptide that binds to a peptide tag may be synthetic (e.g., evolved for affinity interaction) including, but not limited to, an affibody, an anticalin, a monobody and/or a DARPin (see, e.g., Sha et al., Protein Sci. 26(5):910-924 (2017)); Gilbreth (Curr Opin Struc Biol 22(4):413-420 (2013)), U.S. Pat. No. 9,982,053, each of which are incorporated by reference in their entireties for the teachings relevant to affibodies, anticalins, monobodies and/or DARPins.

[0134] In some embodiments, a guide nucleic acid may be linked to an RNA recruiting motif, and a polypeptide to be recruited (e.g., a deaminase) may be fused to an affinity polypeptide that binds to the RNA recruiting motif, wherein the guide binds to the target nucleic acid and the RNA recruiting motif binds to the affinity polypeptide, thereby recruiting the polypeptide to the guide and contacting the target nucleic acid with the polypeptide (e.g., deaminase). In some embodiments, two or more polypeptides may be recruited to a guide nucleic acid, thereby contacting the target nucleic acid with two or more polypeptides (e.g., deaminases).

[0135] In some embodiments of the invention, a guide RNA may be linked to one or to two or more RNA recruiting motifs (e.g., 1, 2, 3, 4, 5, 6, 7, 8, 9, 10 or more motifs; e.g., at least 10 to about 25 motifs), optionally wherein the two or more RNA recruiting motifs may be the same RNA recruiting motif or different RNA recruiting motifs. In some embodiments, an RNA recruiting motif and a corresponding motif (e.g., a corresponding affinity polypeptide) may include, but is not limited, to a telomerase Ku binding motif (e.g., Ku binding hairpin) and an affinity polypeptide of Ku (e.g., Ku heterodimer), a telomerase Sm7 binding motif and an affinity polypeptide of Sm7, an MS2 phage operator stem-loop and an affinity polypeptide of MS2 Coat Protein (MCP), a PP7 phage operator stem-loop and an affinity polypeptide of PP7 Coat Protein (PCP), an SfMu phage Com stem-loop and an affinity polypeptide of Com RNA binding protein, a PUF binding site (PBS) and an affinity polypeptide of Pumilio/fem-3 mRNA binding factor (PUF), and/or a synthetic RNA-aptamer and the aptamer ligand as the corresponding affinity polypeptide. In some embodiments, the RNA recruiting motif and corresponding affinity polypeptide may be an MS2 phage operator stem-loop and the affinity polypeptide MS2 Coat Protein (MCP). In some embodiments, the RNA recruiting motif and corresponding affinity polypeptide may be a PUF binding site (PBS) and the affinity polypeptide Pumilio/fem-3 mRNA binding factor (PUF). Exemplary RNA recruiting motifs and corresponding affinity polypeptides that may be useful with this invention can include, but are not limited to, SEQ ID NOs:42-52.

[0136] In some embodiments, the components for recruiting polypeptides and nucleic acids may include those that function through chemical interactions that may include, but are not limited to, rapamycin-inducible dimerization of FRB-FKBP; Biotin-streptavidin; SNAP tag; Halo tag; CLIP tag; DmrA-DmrC heterodimer induced by a compound; bifunctional ligand (e.g., fusion of two protein-binding chemicals together; e.g. dihyrofolate reductase (DHFR).

[0137] A peptide tag may comprise or be present in one copy or in 2 or more copies of the peptide tag (e.g., multimerized peptide tag or multimerized epitope) (e.g., about 2, 3, 4, 5, 6, 7, 8, 9, 10, 11, 12, 13, 14, 15, 16, 17, 18, 9, 20, 21, 22, 23, 24, or 25 or more peptide tags). When multimerized, the peptide tags may be fused directly to one another or they may be linked to one another via one or more amino acids (e.g., 1, 2, 3, 4, 5, 6, 7, 8, 9, 10, 11, 12, 13, 14, 15, 16, 17, 18, 19, 20 or more amino acids, optionally about 3 to about 10, about 4 to about 10, about 5 to about 10, about 5 to about 15, or about 5 to about 20 amino acids, and the like, and any value or range therein. Thus, in some embodiments, a CRISPR-Cas effector protein of the invention may comprise a CRISPR-Cas effector protein fused to one peptide tag or to two or more peptide tags, optionally wherein the two or more peptide tags are fused to one another via one or more amino acid residues. In some embodiments, a peptide tag useful with the invention may be a single copy of a GCN4 peptide tag or epitope or may be a multimerized GCN4 epitope comprising about 2 to about 25 or more copies of the peptide tag (e.g., about 2, 3, 4, 5, 6, 7, 8, 9, 10, 11, 12, 13, 14, 15, 16, 17, 18, 19, 20, 21, 22, 23, 24, 25 or more copies of a GCN4 epitope or any range therein).

[0138] In some embodiments, a peptide tag may be fused to a polypeptide (e.g., a CRISPR-Cas effector protein or bacterial transfer protein). In some embodiments, a peptide tag may be fused or linked to the C-terminus of a polypeptide (e.g., a CRISPR-Cas effector protein or bacterial transfer protein) to form a fusion protein. In some embodiments, a peptide tag may be fused or linked to the N-terminus of a polypeptide (e.g., a CRISPR-Cas effector protein or bacterial transfer protein) to form a fusion protein. In some embodiments, a peptide tag may be fused within a polypeptide (e.g., a CRISPR-Cas effector protein or bacterial transfer protein); for example, a peptide tag may be in a loop region of a CRISPR-Cas effector protein.

[0139] In some embodiments, when a peptide tag comprises more than one peptide tag, the quantity and spacing of each peptide tag may be optimized to maximize occupation of the peptide tags and minimize steric interference of, for example, deaminase domains, with each other.

[0140] An “affinity polypeptide” (e.g., “recruiting polypeptide”) refers to any polypeptide that is capable of binding to its corresponding peptide tag, peptide tag, or RNA recruiting motif. An affinity polypeptide for a peptide tag may be, for example, an antibody and/or a single chain antibody that specifically binds the peptide tag, respectively. In some embodiments, an antibody for a peptide tag may be, but is not limited to, an scFv antibody. In some embodiments, an affinity polypeptide may be fused or linked to the N-terminus of a deaminase (e.g., a cytosine deaminase or an adenine deaminase). In some embodiments, the affinity polypeptide is stable under the reducing conditions of a cell or cellular extract.

[0141] “Introducing,” “introduce,” “introduced” (and grammatical variations thereof) in the context of a polynucleotide and/or polypeptide of interest means presenting a nucleotide sequence of interest (e.g., polynucleotide, a nucleic acid construct, and/or a guide nucleic acid) and/or polypeptide of interest to a host organism or cell of said organism (e.g., host cell; e.g., a plant cell) in such a manner that the nucleotide sequence and/or polypeptide gains access to the interior of a cell. Thus, for example, a nucleic acid construct of the invention encoding a nucleic acid binding protein (e.g., a CRISPR-Cas effector protein), a guide nucleic acid, and/or an Agrobacterium effector protein may be introduced into a cell of an organism, thereby transforming the cell with the CRISPR-Cas effector protein, guide nucleic acid, and/or Agrobacterium effector protein. In some embodiments, a polypeptide comprising a nucleic acid binding protein (e.g., a CRISPR-Cas effector protein) and/or an Agrobacterium effector protein and/or a guide nucleic acid may be introduced into a cell of an organism, optionally wherein the nucleic acid binding protein and guide nucleic acid may be comprised in a complex (e.g., a ribonucleoprotein).

[0142] The terms “transformation” or “transfection” may be used interchangeably and as used herein refer to the introduction of a heterologous nucleic acid into a cell. Transformation of a cell may be stable or transient. Thus, in some embodiments, a host cell or host organism may be stably transformed with a polynucleotide/nucleic acid molecule of the invention. In some embodiments, a host cell or host organism may be transiently transformed with a nucleic acid construct of the invention.

[0143] “Transient transformation” in the context of a polynucleotide means that a polynucleotide is introduced into the cell and does not integrate into the genome of the cell.

[0144] By “stably introducing” or “stably introduced” in the context of a polynucleotide introduced into a cell is intended that the introduced polynucleotide is stably incorporated into the genome of the cell, and thus the cell is stably transformed with the polynucleotide.

[0145] “Stable transformation” or “stably transformed” as used herein means that a nucleic acid molecule is introduced into a cell and integrates into the genome of the cell. As such, the integrated nucleic acid molecule is capable of being inherited by the progeny thereof, more particularly, by the progeny of multiple successive generations. “Genome” as used herein includes the nuclear and the plastid genome, and therefore includes integration of the nucleic acid into, for example, the chloroplast or mitochondrial genome. Stable transformation as used herein can also refer to a transgene that is maintained extrachromasomally, for example, as a minichromosome or a plasmid.

[0146] Transient transformation may be detected by, for example, an enzyme-linked immunosorbent assay (ELISA) or Western blot, which can detect the presence of a peptide or polypeptide encoded by one or more transgene introduced into an organism. Stable transformation of a cell can be detected by, for example, a Southern blot hybridization assay of genomic DNA of the cell with nucleic acid sequences which specifically hybridize with a nucleotide sequence of a transgene introduced into an organism (e.g., a plant). Stable transformation of a cell can be detected by, for example, a Northern blot hybridization assay of RNA of the cell with nucleic acid sequences which specifically hybridize with a nucleotide sequence of a transgene introduced into a host organism. Stable transformation of a cell can also be detected by, e.g., a polymerase chain reaction (PCR) or other amplification reactions as are well known in the art, employing specific primer sequences that hybridize with target sequence(s) of a transgene, resulting in amplification of the transgene sequence, which can be detected according to standard methods Transformation can also be detected by direct sequencing and/or hybridization protocols well known in the art.

[0147] The terms “transgene” or “transgenic” as used herein refer to at least one nucleic acid sequence that is taken from the genome of one organism, or produced synthetically, and which is then introduced into a host cell (e.g., a plant cell) or organism or tissue of interest and which is subsequently integrated into the host's genome by means of “stable” transformation or transfection approaches. In contrast, the term “transient” transformation or transfection or introduction refers to a way of introducing molecular tools including at least one nucleic acid (DNA, RNA, single-stranded or double-stranded or a mixture thereof) and/or at least one amino acid sequence, optionally comprising suitable chemical or biological agents, to achieve a transfer into at least one compartment of interest of a cell, including, but not restricted to, the cytoplasm, an organelle, including the nucleus, a mitochondrion, a vacuole, a chloroplast, or into a membrane, resulting in transcription and/or translation and/or association and/or activity of the at least one molecule introduced without achieving a stable integration or incorporation and thus inheritance of the respective at least one molecule introduced into the genome of a cell. The term “transgene-free” refers to a condition in which a transgene is not present or found in the genome of a host cell or tissue or organism of interest.

[0148] Accordingly, in some embodiments, nucleotide sequences, polynucleotides, nucleic acid constructs, and/or expression cassettes of the invention may be expressed transiently and/or they can be stably incorporated into the genome of the host organism. Thus, in some embodiments, a nucleic acid construct of the invention (e.g., one or more expression cassettes encoding a nucleic acid binding protein, an DNA dependent DNA polymerase polypeptide or domain thereof, a domain is capable of interacting with a T-DNA sequence, a T-DNA sequence, and/or nucleic acid modifying polypeptide or domain thereof, and the like) may be transiently introduced into a cell with a guide nucleic acid and as such, no DNA is maintained in the cell.

[0149] A nucleic acid construct of the invention may be introduced into a cell (e.g., a plant cell) by any method known to those of skill in the art. In some embodiments, transformation methods include transformation via bacterial-mediated nucleic acid delivery (e.g., via Agrobacteria), viral-mediated nucleic acid delivery, silicon carbide and/or nucleic acid whisker-mediated nucleic acid delivery, liposome mediated nucleic acid delivery, microinjection, microparticle bombardment, calcium-phosphate-mediated transformation, cyclodextrin-mediated transformation, electroporation, nanoparticle-mediated transformation, sonication, infiltration, PEG-mediated nucleic acid uptake, as well as any other electrical, chemical, physical (mechanical) and/or biological mechanism that results in the introduction of nucleic acid into the plant cell, including any combination thereof. In some embodiments of the invention, transformation of a cell comprises nuclear transformation. In some embodiments, transformation of a cell comprises plastid transformation (e.g., chloroplast transformation). In some embodiments, a recombinant nucleic acid construct of the invention can be introduced into a cell via conventional breeding techniques. In some embodiments, one or more of polynucleotide(s), polypeptide(s), expression cassette(s), and/or vector(s) may be introduced into a plant cell via Agrobacterium transformation.

[0150] Procedures for transforming both eukaryotic and prokaryotic organisms are well known and routine in the art and are described throughout the literature (See, for example, Jiang et al. 2013. Nat. Biotechnol. 31:233-239; Ran et al. Nature Protocols 8:2281-2308 (2013)). General guides to various plant transformation methods known in the art include Miki et al. (“Procedures for Introducing Foreign DNA into Plants” in Methods in Plant Molecular Biology and Biotechnology, Glick, B. R. and Thompson, J. E., Eds. (CRC Press, Inc., Boca Raton, 1993), pages 67-88) and Rakowoczy-Trojanowska (Cell. Mol. Biol. Lett. 7:849-858 (2002)).

[0151] A polynucleotide/or polypeptide can be introduced into a host organism or its cell (optionally a plant, plant part, and/or plant cell) in any number of ways that are well known in the art. The methods of the invention do not depend on a particular method for introducing one or more nucleotide sequences into the organism (e.g., a plant), only that they gain access to the interior of at least one cell of the organism. When more than one polynucleotide is to be introduced, it can be assembled as part of a single nucleic acid construct, as separate nucleic acid constructs, can be located on the same or different nucleic acid constructs, and/or as a complex (e.g., a ribonucleoprotein). A polynucleotide and/or polypeptide can be introduced into the cell of interest in a single transformation event, or in separate transformation events, or, alternatively, a polynucleotide and/or polypeptide can be incorporated into a plant as part of a breeding protocol.

[0152] To perform precise templated editing in cells there are several steps, each of which has rate limitations that together can reduce the ability to effectively perform editing. These steps include: (1) inducing the cell to initiate a repair event at the target site. This is typically performed by causing a double-strand break (DSB) or nick by an exogenously provided, sequence-specific nuclease or nickase; (2) local availability of a homologous template to be used for the repair. This step requires the template to be in the proximity of the DSB at exactly the right time when the DSB is competent to commit to a templated editing pathway and is widely regarded to be the rate limiting step with current editing technologies; and (3) efficient incorporation of sequence from the template into the broken or nicked target. The efficiency of step (3) is often low and very difficult to manipulate. In some embodiments, the present invention effectively bypasses the major rate limiting step (2) above and/or the problem of manufacturing, delivering and incorporating long single-stranded DNA repair templates.

[0153] Single-stranded DNA templates have proven to be the most effective for introducing long edits and insertions in mammalian cells. However, these are inconvenient and expensive to manufacture, and difficult to deliver into plant cells. Embodiments of the present invention combine efficient template design with Agrobacterium transformation biology to recruit long, ssDNA molecules (T-DNAs) to the site of DSBs or nicks to make them locally abundant for use as templates. A peptide tag (i.e., epitope tag) can be fused to one or more virulence proteins of Agrobacterium (e.g., VirD2 or VirE2 proteins), which may be used as chaperones for the ss T-DNA into the plant cytoplasm. Such tagged virulence proteins can then be used to not only mediate the entry of the ssDNA into the nucleus but also recruit the T-DNA to the editing target with a nucleic acid binding protein fused to an antibody that recognizes the peptide tag. By making T-DNA molecules locally abundant at the site of the DSB, this invention greatly increases the frequency at which precise templated edits can be made in eukaryotic cells. It may be especially useful for making long templated edits and gene-sized insertions.

[0154] Using the natural biology of Agrobacterium in the T-DNA transfer process and combined with modern genome editing technologies allows the recruitment of a nucleic acid binding protein, a guide nucleic acid, and/or a T-DNA to the target site for use as a long, ssDNA repair template. Thus, this invention provides many advantages over currently available methods for editing (e.g., templated editing) in plants because it utilizes Agrobacterium (e.g., Agrobacterium delivery of a polynucleotide and/or polypeptide and/or utilizing an Agrobacterium nuclear localization signal), the preferred transformation vector for commercial plant pipelines due to its low cost, efficiency, and throughput. As far as the inventors are aware, no other high efficiency method for templated editing via Agrobacterium is available.

[0155] T-DNA is harbored within Agrobacterium cells on a double-stranded plasmid. The natural transfer process begins when VirD1 and VirD2 associate with the left and right borders of the T-DNA and nick it, releasing it from the parent plasmid as a ssDNA molecule. One molecule of the VirD2 protein remains covalently attached at Tyr29 to the 5′-end of the T-DNA and guides the T-DNA from the bacterial cytoplasm, through the bacterial Type IV secretion system, into the plant cell cytoplasm. Independently of the T-DNA, Agrobacterium also secretes the ssDNA binding protein VirE2 into the plant cell and this protein coats the T-DNA in the plant cell cytoplasm and helps chaperone it into the nucleus. Both VirD2 and VirE2 have nuclear localization signals, which may be involved in the transfer of the T-DNA into the nucleus. For more details on the process of T-DNA production and transfer see, K. Singer, The Mechanism of T-DNA Integration: Some Major Unresolved Questions. Current Topics in Microbiology and Immunology. Springer International Publishing AG. 418:287-317 (2018).

[0156] In some embodiments, the invention takes advantage of the escort activity that VirD2 (and other virulence proteins of Agrobacterium (e.g., VirE2)) naturally performs through the plant cell cytoplasm and into the nucleus. Due to the covalent bond between VirD2 and the 5′-end of the T-DNA, the inventors have identified VirD2 (e.g., its nuclear localization signal and/or sequence that binds T-DNA) and other bacterial transfer proteins (e.g., proteins involved in a type IV secretion system (T4SS) such as Agrobacterium virulence proteins) as being useful for a protein-protein interaction strategy to recruit a nucleic acid binding protein, a guide nucleic acid, and/or a T-DNA to a target site (e.g., a target nucleic acid) for modification at the target site. In some embodiments, a T-DNA is recruited to a target site for use as a repair template.

[0157] A “bacterial transfer protein” as used herein refers to a protein in bacteria or a polypeptide or domain thereof that is involved in the transfer of a nucleic acid (e.g., DNA or RNA, optionally a plasmid or T-DNA) from one cell to another cell, optionally during bacterial conjugation. A bacterial transfer protein may include all or a portion of a bacterial transfer protein. In some embodiments, a bacterial transfer protein is a wild-type bacterial transfer protein. In some embodiments, a bacterial transfer protein is a synthetic bacterial transfer protein (i.e., a bacterial transfer protein that is synthetically engineered to be different than a wild-type bacterial transfer protein). In some embodiments, a bacterial transfer protein is a bacterial protein involved in a type IV secretion system (T4SS). In some embodiments, a bacterial transfer protein comprises a nuclear localization signal and/or a T4SS secretion signal. In some embodiments, a bacterial transfer protein is capable of recruiting T-DNA to a target site as described herein. In some embodiments, a bacterial transfer protein is involved in bacterial conjugation. In some embodiments, a bacterial transfer protein is secreted into a host cell. Exemplary bacterial transfer proteins include, but are not limited to, an Agrobacterium protein (e.g., an Agrobacterium tumefaciens protein or an Agrobacterium rhizogenes protein), a Helicobacter pylori protein, an Enterococcus protein (e.g., an Enterococcus faecalis protein), an Escherichia coli protein, a Legionella protein (e.g., a L. pneumophila protein), a Sinorhizobium protein (e.g. Sinorhizobium meliloti), a Rhizobium protein (e.g. Rhizobium sp. NGR234 or Rhizobium etli), a Mesorhizobium protein (e.g. Mesorhizobium loti), a Rickettsia protein (e.g., a R. prowazekii protein or a R. typhi protein); an Ensifer protein (e.g., an E. adhaerens protein), and/or an Ochrobactrum protein (e.g., Ochrobactrum haywardense). In some embodiments, a bacterial transfer protein is an Agrobacterium effector protein. Further exemplary bacterial transfer proteins include, but are not limited to, (e.g., all or a portion of) VirD2, VirE2, VirF, VirE3, VirD5, GALLS, MobA, MobC-CloDF13, TraI-F, TraI-RP4, TraIR388, CagA-Cag, and/or RalF-Dot/Icm.

[0158] An “Agrobacterium effector protein” as used herein refers to an Agrobacterium protein or a polypeptide or domain thereof that is involved in the secretion of a nucleic acid (e.g., DNA or RNA, optionally a plasmid or T-DNA) from a bacterial cell to a host cell (e.g., a host eukaryotic cell). Thus, an Agrobacterium effector protein may include all or a portion of an Agrobacterium protein. In some embodiments, an Agrobacterium effector protein is a wild-type Agrobacterium protein. In some embodiments, an Agrobacterium effector protein is a synthetic Agrobacterium protein (i.e., an Agrobacterium effector protein that is synthetically engineered to be different than a wild-type Agrobacterium protein). In some embodiments, an Agrobacterium effector protein is capable of recruiting T-DNA to a target site as described herein. In some embodiments, an Agrobacterium effector protein is involved in bacterial conjugation. In some embodiments, an Agrobacterium effector protein is secreted into a host cell. Exemplary Agrobacterium effector proteins include, but are not limited to, VirD2, VirE2, VirF, VirE3, VirD5, and/or GALLS.

[0159] In some embodiments, a composition, system, complex, and/or method of the present invention comprises recruiting a T-DNA to a target (e.g., a nucleic acid binding protein) and/or target site (e.g., comprising a target nucleic acid), optionally wherein the T-DNA comprises a repair template (e.g., a homology repair template) that may be used for modifying a target nucleic acid. For example, a T-DNA may be recruited to a nucleic acid binding protein (e.g., via interaction of a recruiting motif and corresponding motif) and the nucleic acid binding protein in binding and/or forming a complex with a guide nucleic acid may be recruited to a target nucleic acid through interaction (e.g., binding) of the guide nucleic acid to a target site in the vicinity of and/or comprising the target nucleic acid. In some embodiments, the T-DNA may be recruited to the nucleic acid binding protein by the nucleic acid binding protein comprising a recruiting motif and a bacterial transfer protein comprising a corresponding motif and the bacterial transfer protein interacts (e.g., binds) to the T-DNA. In some embodiments, a composition, system, complex, and/or method of the present invention may provide a higher concentration of a T-DNA optionally comprising a repair template at a target site and/or target nucleic acid. Thus, in some embodiments, an increased, localized concentration of a T-DNA optionally comprising a repair template may be provided at a target site and/or a target nucleic acid according to a composition, system, complex, and/or method of the present invention compared to the concentration of a T-DNA overall in the cell and/or compared to the concentration of a T-DNA not in accordance with the present invention. In some embodiments, a composition, system, complex, and/or method of the present invention does not involve and/or is devoid of recruiting a T-DNA to a target site.

[0160] In some embodiments, a composition, system, complex, and/or method of the present invention comprises and/or is configured for providing homology directed repair. In some embodiments, a composition, system, complex, and/or method of the present invention provides and/or is configured for providing a modified nucleic acid, optionally wherein the cell and/or organism (e.g., plant) comprising the modified nucleic acid is transgene-free.

[0161] A bacterial transfer protein of the present invention may comprise a nuclear localization signal. In some embodiments, a bacterial transfer protein of the present invention comprises a T4SS secretion signal, optionally wherein the T4SS secretion signal comprises an amino acid sequence of SEQ ID NO:166 or 167. A bacterial transfer protein of the present invention may comprise an amino acid sequence having at least 70%, 75%, 80%, 85%, or 90% amino acid sequence similarity to SEQ ID NOs:166, 167, 168, 225, and/or 226. In some embodiments, the bacterial transfer protein of the present invention comprises an amino acid sequence of SEQ ID NOs:166, 167, 168, 225, and/or 226. A bacterial transfer protein of the present invention may have any suitable length. In some embodiments, a bacterial transfer protein of the present invention comprises about 1%, 2%, 5%, 10%, 15%, 20%, 25%, 30%, 35%, 40%, 45%, 50%, 55%, 60%, 65%, 70%, 75%, 80%, 85%, 90%, 95%, 97%, 98%, 99%, or 100% amino acids of a wild-type bacterial transfer protein. In some embodiments, a bacterial transfer protein of the present invention has a length of 5, 10, 15, or 20 amino acids to 25, 30, 35, 40, 45, or 50 amino acids. In some embodiments, a bacterial transfer protein of the present invention has a length of 10, 25, 50, 75, 100, or 150 amino acids to 175, 200, 225, 250, 275, 300, 325, 350, or 375 amino acids.

[0162] In some embodiments, the bacterial transfer protein is an Agrobacterium protein (e.g., an Agrobacterium virulence protein). In some embodiments, the bacterial transfer protein is VirD2 or VirE2, optionally for use in recruitment of a nucleic acid binding protein, a guide nucleic acid, and/or a T-DNA (e.g., a T-DNA comprising a repair template) to a target nucleic acid. A bacterial transfer protein may be fused to a nucleic acid binding protein and/or a guide nucleic acid. Fusion of a bacterial transfer protein to another polypeptide may not interfere with the protein's essential function(s) (e.g., release of the T-DNA strand from the plasmid, covalent attachment to the T-DNA strand, and/or secretion across the specific virulence (vir)-induced type IV secretion system (T4SS)).

[0163] As discussed above, VirE2 is secreted independently of T-DNA. VirE2 coats the ssT-DNA in the plant cell cytoplasm to which it has been transferred. Each VirE2 protein contains two nuclear-localization signals, which may be involved in transport of the T-DNA complex into the nucleus and as such may also be a good candidate for a fusion polypeptide of this invention.

[0164] In some embodiments, a nucleic acid binding protein (e.g., a sequence specific DNA binding protein) and a bacterial transfer protein (e.g., a virulence proteins such as VirD2, VirE2, etc.) originate in different compartments and are expected to locate each other and associate in the eukaryotic cell. Thus, non-covalent recruitment strategies such as a peptide tag system (e.g., a peptide tag and an affinity polypeptide that binds to the peptide tag) or a RNA recruiting motif system (e.g., a RNA recruiting motif and an affinity polypeptide that binds to the RNA recruiting motif) may be used to carry out this invention.

[0165] In some embodiments, to enable efficient integration of a T-DNA encoded edit into a plant genome, the T-DNA can have a single homology arm or two homology arms flanking the edit to exploit the cell's native homology-directed repair pathway. Alternatively, the T-DNA may have a short primer binding site with complementarity to a nicked genomic target for use in an application somewhat like “prime editing”. Here, DNA-dependent DNA polymerase rather than reverse transcriptase may be utilized to incorporate the edit. In some embodiments, a T-DNA useful with the present invention may have microhomology flanking the desired edit, so as to be incorporated via the microhomology-mediated end joining pathway. In some embodiments, a T-DNA useful with this invention can be configured to integrate via the classical non-homologous end-joining pathway with ligation steps at each end to incorporate it into the genome.

[0166] Provided according to some embodiments is a fusion protein comprising a bacterial transfer protein and a recruiting motif (e.g., an affinity polypeptide, an RNA recruiting motif, or a peptide tag). Exemplary fusion proteins comprising a bacterial transfer protein and a recruiting motif include, but are not limited to, those of SEQ ID NOs:71, 175, 177, 178, 180-182, 184, 186, 188, 190-192, and/or 194. In some embodiments, the bacterial transfer protein comprises (e.g., all or a portion of) an Agrobacterium protein (e.g., an Agrobacterium tumefaciens protein or an Agrobacterium rhizogenes protein), a Helicobacter pylori protein, an Enterococcus protein (e.g., an Enterococcus faecalis protein), an Escherichia coli protein, a Legionella protein (e.g., a L. pneumophila protein), a Sinorhizobium protein (e.g. Sinorhizobium meliloti), a Rhizobium protein (e.g. Rhizobium sp. NGR234 or Rhizobium etli), a Mesorhizobium protein (e.g. Mesorhizobium loti), a Rickettsia protein (e.g., a R. prowazekii protein or a R. typhi protein); an Ensifer protein (e.g., an E. adhaerens protein), and/or an Ochrobactrum protein (e.g., Ochrobactrum haywardense). In some embodiments, the bacterial transfer protein is a bacterial protein in a type IV secretion system. The bacterial transfer protein of the fusion protein may have any suitable length. In some embodiments, the bacterial transfer protein of the fusion protein has a length of 5, 10, 15, or 20 amino acids to 25, 30, 35, 40, 45, or 50 amino acids. In some embodiments, the bacterial transfer protein of the fusion protein has a length of 10, 25, 50, 75, 100, or 150 amino acids to 175, 200, 225, 250, 275, 300, 325, 350, or 375 amino acids. In some embodiments, the bacterial transfer protein of the fusion protein comprises all or a portion of a binding domain (e.g., a peptide/protein binding domain or DNA binding domain) and/or a nuclear localization signal (e.g., a T4SS secretion signal). In some embodiments, the bacterial transfer protein of the fusion protein comprises an amino acid sequence having at least 70%, 75%, 80%, 85%, or 90% amino acid sequence similarity to SEQ ID NOs:166, 167, 168, 225, and/or 226, optionally wherein the bacterial transfer protein comprises or is an amino acid sequence of SEQ ID NOs:166, 167, 168, 225, and/or 226. The bacterial transfer protein may comprise (e.g., all or a portion of) VirD2, VirE2, VirF, VirE3, VirD5, GALLS, MobA, MobC-CloDF13, TraI-F, TraI-RP4, TraIR388, CagA-Cag, and/or RalF-Dot/Icm. In some embodiments, the bacterial transfer protein comprises an Agrobacterium effector protein such as an Agrobacterium virulence protein (e.g., VirD2, VirE2, VirF, VirE3, VirD5, etc.).

[0167] The recruiting motif of the fusion protein may be fused to the N—or C— terminus of the bacterial transfer protein, optionally with a linker (e.g., a peptide linker) between the bacterial transfer protein and the recruiting motif. In some embodiments, the recruiting motif of the fusion protein may be fused within the bacterial transfer protein (e.g., in a loop region of the bacterial transfer protein), optionally with a linker (e.g., a peptide linker) between the bacterial transfer protein and the recruiting motif. A corresponding motif for the recruiting motif may be used to recruit the fusion protein to a target (e.g., a guide nucleic acid), a target site and/or a target nucleic acid. In some embodiments, the recruiting motif is an affinity polypeptide and optionally a peptide tag (e.g., a peptide tag fused to a nucleic acid binding protein) that binds to the affinity polypeptide may be used to recruit the fusion protein to a target (e.g., the nucleic acid binding protein), a target site, and/or a target nucleic acid. In some embodiments, the recruiting motif is a peptide tag and optionally an affinity polypeptide (e.g., an affinity polypeptide fused to a nucleic acid binding protein) that binds to the peptide tag may be used to recruit the fusion protein to a target (e.g., the nucleic acid binding protein), a target site and/or a target nucleic acid. In some embodiments, the recruiting motif is an affinity polypeptide and optionally a RNA recruiting motif (e.g., a RNA recruiting motif fused to a guide nucleic acid) that binds to the affinity polypeptide may be used to recruit the fusion protein to a target (e.g., the guide nucleic acid), a target site and/or a target nucleic acid.

[0168] A composition, system, kit or complex of the present invention may comprise a fusion protein including a bacterial transfer protein and a recruiting motif. In some embodiments, the composition, system, kit or complex comprises a guide nucleic acid which may comprise a corresponding motif for the recruiting motif. In some embodiments, the composition, system, kit or complex comprises a nucleic acid binding polypeptide (e.g., a CRISPR-Cas effector protein), which may comprise a corresponding motif for the recruiting motif. In some embodiments, the composition, system, kit or complex comprises a T-DNA, and the bacterial transfer protein of the fusion protein may interact with the T-DNA.

[0169] A method of the present invention may comprise contacting a target nucleic acid with a nucleic acid binding polypeptide, a guide nucleic acid, and a fusion protein including a bacterial transfer protein and a recruiting motif optionally to modify a target nucleic acid. In some embodiments, contacting the target nucleic acid comprises using a composition, system, kit or complex comprising the fusion protein to contact the target nucleic acid. In some embodiments, the nucleic acid binding polypeptide and the guide nucleic acid form a complex or are comprised in a complex. The complex may also comprise the fusion protein. In some embodiments, the guide nucleic acid comprises a corresponding motif (e.g., an RNA recruiting motif such as an RNA aptamer) for the recruiting motif of the fusion protein, and this corresponding motif may recruit the fusion protein to the guide nucleic acid and/or to the target nucleic acid. In some embodiments, the nucleic acid binding polypeptide comprises a corresponding motif for the recruiting motif of the fusion protein, and this corresponding motif may recruit the fusion protein to the nucleic acid binding polypeptide and/or to the target nucleic acid. In some embodiments, a method, composition, system, kit or complex of the present comprises a T-DNA (e.g., a T-DNA that is present in an Agrobacterium such as during the contacting step). When the T-DNA is present, the bacterial transfer protein of the fusion protein may interact with the T-DNA. In some embodiments, the method is devoid of T-DNA transfer. In some embodiments, the method of modifying the target nucleic acid does not require T-DNA transfer in order to induce modification and/or provide the modified target nucleic acid and/or the method comprises non-templated editing, PRIME editing and/or REDRAW of the target nucleic acid. The fusion protein, the nucleic acid binding polypeptide, and/or the guide nucleic acid may be expressed in Agrobacterium that is contacted to a cell to thereby modify a target nucleic acid present in the cell. In some embodiments, a nucleic acid (e.g., a plasmid and/or T-DNA) of the Agrobacterium encodes the fusion protein, the nucleic acid binding polypeptide and/or the guide nucleic acid. Upon contact of the Agrobacterium with a cell (e.g., a plant cell) the fusion protein, the nucleic acid binding polypeptide, and/or the guide nucleic acid (each of which may optionally be in a complex and/or which may be expressed in the Agrobacterium and/or encoded in a nucleic acid of the Agrobacterium) may be transported (e.g., secreted) into the cell comprising the target nucleic acid to thereby contact and modify the target nucleic acid. In some embodiments, an Agrobacterium cell expresses and/or encodes (e.g., on a plasmid such as a tumor inducing plasmid) the fusion protein, expresses and/or encodes (e.g., on the same or a different plasmid than the fusion protein) the nucleic acid binding polypeptide, and/or comprises the guide nucleic acid (e.g., on the same or different plasmid than the fusion protein and/or nucleic acid binding polypeptide) and, upon contact of the Agrobacterium cell and another cell (e.g., a plant cell), the expressed fusion protein, expressed nucleic acid binding polypeptide, and/or guide nucleic acid are transported (e.g., secreted) into the cell comprising a target nucleic acid to thereby modify the target nucleic acid. In some embodiments, the guide nucleic acid is encoded in a nucleic acid, plasmid or T-DNA of the Agrobacterium cell. In some embodiments, an Agrobacterium cell expresses the fusion protein, expresses the nucleic acid binding polypeptide, and/or comprises the guide nucleic acid and, upon contact of the Agrobacterium cell and another cell (e.g., a plant cell), the expressed fusion protein, expressed nucleic acid binding polypeptide, and/or guide nucleic acid are transported (e.g., secreted) into the cell comprising a target nucleic acid to thereby modify the target nucleic acid. In some embodiments, the fusion protein, the nucleic acid binding polypeptide, and/or the guide nucleic acid may be transported (e.g., secreted) via a Type IV secretion system into the cell.

[0170] Provided according to some embodiments is a fusion protein comprising a bacterial transfer protein and a nucleic acid binding polypeptide. Exemplary fusion proteins comprising a bacterial transfer protein and a nucleic acid binding polypeptide include, but are not limited to, those of SEQ ID NOs:65, 66, 69, and/or 70. In some embodiments, the bacterial transfer protein comprises (e.g., all or a portion of) an Agrobacterium protein (e.g., an Agrobacterium tumefaciens protein or an Agrobacterium rhizogenes protein), a Helicobacter pylori protein, an Enterococcus protein (e.g., an Enterococcus faecalis protein), an Escherichia coli protein, a Legionella protein (e.g., a L. pneumophila protein), a Sinorhizobium protein (e.g. Sinorhizobium meliloti), a Rhizobium protein (e.g. Rhizobium sp. NGR234 or Rhizobium etli), a Mesorhizobium protein (e.g. Mesorhizobium loti), a Rickettsia protein (e.g., a R. prowazekii protein or a R. typhi protein); an Ensifer protein (e.g., an E. adhaerens protein), and/or an Ochrobactrum protein (e.g., Ochrobactrum haywardense). In some embodiments, the bacterial transfer protein is a bacterial protein in a type IV secretion system. The bacterial transfer protein of the fusion protein may have any suitable length. In some embodiments, the bacterial transfer protein of the fusion protein has a length of 5, 10, 15, or 20 amino acids to 25, 30, 35, 40, 45, or 50 amino acids. In some embodiments, the bacterial transfer protein of the fusion protein has a length of 10, 25, 50, 75, 100, or 150 amino acids to 175, 200, 225, 250, 275, 300, 325, 350, or 375 amino acids. In some embodiments, the bacterial transfer protein comprises all or a portion of a binding domain (e.g., a peptide/protein binding domain or DNA binding domain) and/or a nuclear localization signal (e.g., a T4SS secretion signal). In some embodiments, the bacterial transfer protein comprises an amino acid sequence having at least 70%, 75%, 80%, 85%, or 90% amino acid sequence similarity to SEQ ID NOs:166, 167, 168, 225, and/or 226, optionally wherein the bacterial transfer protein comprises or is an amino acid sequence of SEQ ID NOs:166, 167, 168, 225, and/or 226. The bacterial transfer protein may comprise (e.g., all or a portion of) VirD2, VirE2, VirF, VirE3, VirD5, GALLS, MobA, MobC-CloDF13, TraI-F, TraI-RP4, TraIR388, CagA-Cag, and/or RalF-Dot/Icm. In some embodiments, the bacterial transfer protein comprises an Agrobacterium effector protein such as an Agrobacterium virulence protein (e.g., VirD2, VirE2, VirF, VirE3, VirD5, etc.).

[0171] The nucleic acid binding polypeptide of the fusion protein may be fused to the N—or C— terminus of the bacterial transfer protein, optionally with a linker (e.g., a peptide linker) between the bacterial transfer protein and the nucleic acid binding polypeptide. In some embodiments, the nucleic acid binding polypeptide of the fusion protein may be fused within the bacterial transfer protein (e.g., in a loop region of the bacterial transfer protein), optionally with a linker (e.g., a peptide linker) between the bacterial transfer protein and the nucleic acid binding polypeptide. In some embodiments, the nucleic acid binding polypeptide comprises (e.g., all or a portion of) a CRISPR-Cas effector protein such as, but not limited to, a Type I CRISPR-Cas system, a Type II CRISPR-Cas system, a Type III CRISPR-Cas system, a Type IV CRISPR-Cas system and/or a Type V CRISPR-Cas system. In some embodiments, the nucleic acid binding polypeptide comprises (e.g., all or a portion of) Cas9. In some embodiments, the nucleic acid binding polypeptide comprises (e.g., all or a portion of) Cas12 (e.g., Cas12a).

[0172] A composition, system, kit or complex of the present invention may comprise a fusion protein including a bacterial transfer protein and a nucleic acid binding polypeptide. In some embodiments, the composition, system, kit or complex comprises a guide nucleic acid. The fusion protein and guide nucleic acid may be comprised in a complex. In some embodiments, the composition, system, kit or complex comprises a T-DNA, and the bacterial transfer protein of the fusion protein may interact with the T-DNA.

[0173] A method of the present invention may comprise contacting a target nucleic acid with a guide nucleic acid and a fusion protein including a bacterial transfer protein and a nucleic acid binding polypeptide optionally to modify a target nucleic acid. In some embodiments, contacting the target nucleic acid comprises using a composition, system, kit or complex comprising the fusion protein to contact the target nucleic acid. In some embodiments, the fusion protein and the guide nucleic acid form a complex or are comprised in a complex. In some embodiments, a method, composition, system, kit or complex of the present comprises a T-DNA (e.g., a T-DNA that is present in an Agrobacterium such as during the contacting step). When the T-DNA is present, the bacterial transfer protein of the fusion protein may interact with the T-DNA. In some embodiments, the method is devoid of T-DNA transfer. In some embodiments, the method of modifying the target nucleic acid does not require T-DNA transfer in order to induce modification and/or provide the modified target nucleic acid and/or the method comprises non-templated editing, PRIME editing and/or REDRAW of the target nucleic acid. The fusion protein and/or the guide nucleic acid may be expressed in Agrobacterium that is contacted to a cell to thereby modify a target nucleic acid present in the cell. In some embodiments, a nucleic acid (e.g., a plasmid and/or T-DNA) of the Agrobacterium encodes the fusion protein and/or the guide nucleic acid. Upon contact of the Agrobacterium with a cell (e.g., a plant cell) the fusion protein and/or the guide nucleic acid (each of which may optionally be in a complex and/or which may be expressed in the Agrobacterium and/or encoded in a nucleic acid of the Agrobacterium) may be transported (e.g., secreted) into the cell comprising the target nucleic acid to thereby contact and modify the target nucleic acid. In some embodiments, an Agrobacterium cell expresses and/or encodes (e.g., on a plasmid such as a tumor inducing plasmid) the fusion protein and/or comprises the guide nucleic acid (e.g., on the same or different plasmid than the fusion protein) and, upon contact of the Agrobacterium cell and another cell (e.g., a plant cell), the expressed fusion protein and/or guide nucleic acid are transported (e.g., secreted) into the cell comprising a target nucleic acid to thereby modify the target nucleic acid. In some embodiments, the guide nucleic acid is encoded in a nucleic acid, plasmid or T-DNA of the Agrobacterium cell. In some embodiments, an Agrobacterium cell expresses the fusion protein and/or comprises the guide nucleic acid and, upon contact of the Agrobacterium cell and another cell (e.g., a plant cell), the expressed fusion protein and/or guide nucleic acid are transported (e.g., secreted) into the cell comprising a target nucleic acid to thereby modify the target nucleic acid. In some embodiments, the fusion protein and/or the guide nucleic acid may be transported (e.g., secreted) via a Type IV secretion system into the cell.

[0174] Provided according to some embodiments is a fusion protein comprising a nucleic acid binding polypeptide and a recruiting motif (e.g., an affinity polypeptide, an RNA recruiting motif, or a peptide tag). Exemplary fusion proteins comprising a nucleic acid binding polypeptide and a recruiting motif include, but are not limited to, those of SEQ ID NOs:173, 174, 176, 179, 183, 185, 187, 189, 193, and/or 195. In some embodiments, the nucleic acid binding polypeptide comprises (e.g., all or a portion of) a CRISPR-Cas effector protein such as, but not limited to, a Type I CRISPR-Cas system, a Type II CRISPR-Cas system, a Type III CRISPR-Cas system, a Type IV CRISPR-Cas system and/or a Type V CRISPR-Cas system. In some embodiments, the nucleic acid binding polypeptide comprises (e.g., all or a portion of) Cas9. In some embodiments, the nucleic acid binding polypeptide comprises (e.g., all or a portion of) Cas12 (e.g., Cas12a).

[0175] The recruiting motif of the fusion protein may be fused to the N—or C— terminus of the nucleic acid binding polypeptide, optionally with a linker (e.g., a peptide linker) between the nucleic acid binding polypeptide and the recruiting motif. In some embodiments, the recruiting motif of the fusion protein may be fused within the nucleic acid binding polypeptide (e.g., in a loop region of the nucleic acid binding polypeptide), optionally with a linker (e.g., a peptide linker) between the nucleic acid binding polypeptide and the recruiting motif. A corresponding motif for the recruiting motif may be used to recruit the fusion protein to a target (e.g., a bacterial transfer protein), a target site and/or a target nucleic acid. In some embodiments, the recruiting motif is an affinity polypeptide and optionally a peptide tag (e.g., a peptide tag fused to a bacterial transfer protein) that binds to the affinity polypeptide may be used to recruit the fusion protein to a target (e.g., the bacterial transfer protein), a target site, and/or a target nucleic acid. The recruiting motif may be an antibody that binds to the bacterial transfer protein, such as, but not limited to an antibody have an amino acid sequence of SEQ ID NO:169. In some embodiments, the recruiting motif is a peptide tag and optionally an affinity polypeptide (e.g., an affinity polypeptide fused to a bacterial transfer protein) that binds to the peptide tag may be used to recruit the fusion protein to a target (e.g., the bacterial transfer protein), a target site and/or a target nucleic acid. In some embodiments, the recruiting motif is an affinity polypeptide and optionally a RNA recruiting motif (e.g., a RNA recruiting motif fused to a guide nucleic acid) that binds to the affinity polypeptide may be used to recruit the fusion protein to a target (e.g., the guide nucleic acid), a target site and/or a target nucleic acid.

[0176] A composition, system, kit or complex of the present invention may comprise a fusion protein including a nucleic acid binding polypeptide and a recruiting motif. In some embodiments, the composition, system, kit or complex comprises a guide nucleic acid which may comprise a corresponding motif for the recruiting motif. In some embodiments, the composition, system, kit or complex comprises a bacterial transfer protein, which may comprise a corresponding motif for the recruiting motif. The bacterial transfer protein may comprise (e.g., all or a portion of) an Agrobacterium protein (e.g., an Agrobacterium tumefaciens protein or an Agrobacterium rhizogenes protein), a Helicobacter pylori protein, an Enterococcus protein (e.g., an Enterococcus faecalis protein), an Escherichia coli protein, a Legionella protein (e.g., a L. pneumophila protein), a Sinorhizobium protein (e.g. Sinorhizobium meliloti), a Rhizobium protein (e.g. Rhizobium sp. NGR234 or Rhizobium etli), a Mesorhizobium protein (e.g. Mesorhizobium loti), a Rickettsia protein (e.g., a R. prowazekii protein or a R. typhi protein); an Ensifer protein (e.g., an E. adhaerens protein), and/or an Ochrobactrum protein (e.g., Ochrobactrum haywardense). In some embodiments, the bacterial transfer protein is a bacterial protein in a type IV secretion system. The bacterial transfer protein of the fusion protein may have any suitable length. In some embodiments, the bacterial transfer protein has a length of 5, 10, 15, or 20 amino acids to 25, 30, 35, 40, 45, or 50 amino acids. In some embodiments, the bacterial transfer protein of the fusion protein has a length of 10, 25, 50, 75, 100, or 150 amino acids to 175, 200, 225, 250, 275, 300, 325, 350, or 375 amino acids. In some embodiments, the bacterial transfer protein comprises all or a portion of a binding domain (e.g., a peptide/protein binding domain or DNA binding domain) and/or a nuclear localization signal (e.g., a T4SS secretion signal). In some embodiments, the bacterial transfer protein comprises an amino acid sequence having at least 70%, 75%, 80%, 85%, or 90% amino acid sequence similarity to SEQ ID NOs:166, 167, 168, 225, and/or 226, optionally wherein the bacterial transfer protein comprises or is an amino acid sequence of SEQ ID NOs:166, 167, 168, 225, and/or 226. The bacterial transfer protein may comprise (e.g., all or a portion of) VirD2, VirE2, VirF, VirE3, VirD5, GALLS, MobA, MobC-CloDF13, TraI-F, TraI-RP4, TraIR388, CagA-Cag, and/or RalF-Dot/Icm. In some embodiments, the bacterial transfer protein comprises an Agrobacterium effector protein such as an Agrobacterium virulence protein (e.g., VirD2, VirE2, VirF, VirE3, VirD5, etc.). In some embodiments, the composition, system, kit or complex comprises a T-DNA, and a bacterial transfer protein (that optionally interacts with the fusion protein) may interact with the T-DNA.

[0177] A method of the present invention may comprise contacting a target nucleic acid with a bacterial transfer protein, a guide nucleic acid, and a fusion protein including a nucleic acid binding polypeptide and a recruiting motif optionally to modify a target nucleic acid. In some embodiments, contacting the target nucleic acid comprises using a composition, system, kit or complex comprising the fusion protein to contact the target nucleic acid. In some embodiments, the fusion protein and the guide nucleic acid form a complex or are comprised in a complex. The complex may also comprise the bacterial transfer protein. In some embodiments, the guide nucleic acid comprises a corresponding motif (e.g., an RNA recruiting motif such as an RNA aptamer) for the recruiting motif of the fusion protein, and this corresponding motif may recruit the fusion protein to the guide nucleic acid and/or to the target nucleic acid. In some embodiments, the bacterial transfer protein comprises a corresponding motif for the recruiting motif of the fusion protein, and this corresponding motif may recruit the fusion protein to the bacterial transfer protein and/or to the target nucleic acid. In some embodiments, a method, composition, system, kit or complex of the present comprises a T-DNA (e.g., a T-DNA that is present in an Agrobacterium such as during the contacting step). When the T-DNA is present, a bacterial transfer protein may interact with the T-DNA. In some embodiments, the method is devoid of T-DNA transfer. In some embodiments, the method of modifying the target nucleic acid does not require T-DNA transfer in order to induce modification and/or provide the modified target nucleic acid and/or the method comprises non-templated editing, PRIME editing and/or REDRAW of the target nucleic acid. The fusion protein, the bacterial transfer protein, and/or the guide nucleic acid may be expressed in Agrobacterium that is contacted to a cell to thereby modify a target nucleic acid present in the cell. In some embodiments, a nucleic acid (e.g., a plasmid and/or T-DNA) of the Agrobacterium encodes the fusion protein, the bacterial transfer protein and/or the guide nucleic acid. Upon contact of the Agrobacterium with a cell (e.g., a plant cell) the fusion protein, the bacterial transfer protein, and/or the guide nucleic acid (each of which may optionally be in a complex and/or which may be expressed in the Agrobacterium and/or encoded in a nucleic acid of the Agrobacterium) may be transported (e.g., secreted) into the cell comprising the target nucleic acid to thereby contact and modify the target nucleic acid. In some embodiments, an Agrobacterium cell expresses and/or encodes (e.g., on a plasmid such as a tumor inducing plasmid) the fusion protein, expresses and/or encodes (e.g., on the same or a different plasmid than the fusion protein) the bacterial transfer protein, and/or comprises the guide nucleic acid (e.g., on the same or different plasmid than the fusion protein and/or bacterial transfer protein) and, upon contact of the Agrobacterium cell and another cell (e.g., a plant cell), the expressed fusion protein, expressed bacterial transfer protein, and/or guide nucleic acid are transported (e.g., secreted) into the cell comprising a target nucleic acid to thereby modify the target nucleic acid. In some embodiments, the guide nucleic acid is encoded in a nucleic acid, plasmid or T-DNA of the Agrobacterium cell. In some embodiments, an Agrobacterium cell expresses the fusion protein, expresses the bacterial transfer protein, and/or comprises the guide nucleic acid and, upon contact of the Agrobacterium cell and another cell (e.g., a plant cell), the expressed fusion protein, expressed nucleic acid binding polypeptide, and/or guide nucleic acid are transported (e.g., secreted) into the cell comprising a target nucleic acid to thereby modify the target nucleic acid. In some embodiments, the fusion protein, the bacterial transfer protein, and/or the guide nucleic acid may be transported (e.g., secreted) via a Type IV secretion system into the cell.

[0178] According to some embodiments, the present invention provides a composition comprising a domain fused to a peptide tag (e.g., an epitope, a peptide repeat unit) or an affinity polypeptide, wherein the domain is capable of interacting with a T-DNA sequence. In some embodiments, the affinity polypeptide is capable of binding a peptide tag and/or an RNA recruiting motif. In some embodiments, the peptide tag or RNA recruiting motif may be fused to a nucleic acid binding polypeptide, thereby recruiting the domain capable of interacting with a T-DNA sequence to the nucleic acid binding polypeptide and to a nucleic acid target site to which the nucleic acid binding polypeptide binds.

[0179] In some embodiments, a composition is provided that comprises a nucleic acid binding polypeptide fused to an affinity polypeptide, wherein the affinity polypeptide is capable of binding a domain that is capable of interacting with a T-DNA sequence, optionally wherein the affinity polypeptide is an antibody capable of binding an Agrobacterium effector protein.

[0180] In some embodiments, the present invention provides a composition comprising (a) a domain that is capable of interacting with a T-DNA sequence (e.g., an Agrobacterium effector protein) fused to: (i) a nucleic acid binding polypeptide; and/or (ii) a domain that is capable of interacting with a nucleic acid binding polypeptide (e.g., an affinity polypeptide (e.g., a polypeptide capable of binding a peptide tag)). In some embodiments, a polypeptide that is capable of interacting with (binding) a T-DNA is an Agrobacterium effector protein (e.g., VirD2, VirE2, and the like). In some embodiments, when the Agrobacterium effector protein is VirD2, the VirD2 may covalently link to the T-DNA at the 5′ end of the T-DNA. In some embodiments, when the Agrobacterium effector protein is VirE2, the VirE2 stoichiometrically “coats”, “complexes”, and/or “associates” noncovalently with ssT-DNA.

[0181] In some embodiments, the present invention provides a composition comprising a nucleic acid binding protein fused to an affinity polypeptide, wherein the affinity polypeptide is capable of binding a domain that is capable of interacting with a T-DNA sequence. In some embodiments, a domain that is capable of interacting with a T-DNA sequence may be an Agrobacterium effector protein (e.g., VirD2, VirE2) and the affinity polypeptide is capable of binding the Agrobacterium effector protein.

[0182] In some embodiments, the compositions of the invention may further comprise one or more CRISPR guide nucleic acids. In some embodiments, a CRISPR guide nucleic acid of the invention may be linked to an RNA recruiting motif.

[0183] In some embodiments, the present invention provides a system, the system comprising:
[0184] (a) an Agrobacterium effector fusion protein comprising an Agrobacterium effector protein domain fused to a peptide tag;
[0185] (b) a CRISPR-Cas effector fusion protein comprising a CRISPR-Cas effector protein domain fused to an affinity polypeptide that is capable of interacting with the peptide tag;
[0186] (c) optionally a T-DNA sequence; and
[0187] (d) a CRISPR guide nucleic acid comprising a spacer sequence and a repeat sequence, wherein the guide nucleic acid is capable of forming a complex with the CRISPR-Cas effector protein domain of the CRISPR-Cas fusion protein and the spacer sequence is capable of hybridizing to a target nucleic acid, thereby guiding the CRISPR-Cas fusion protein to the target nucleic acid, wherein the affinity polypeptide of the CRISPR-Cas fusion protein interacts with the peptide tag of the Agrobacterium effector fusion protein and the Agrobacterium effector protein domain associates with the T-DNA (if present), thereby recruiting the Agrobacterium effector protein domain and optionally the T-DNA to the CRISPR-Cas effector protein domain and to the target nucleic acid, whereby the system is capable of modifying the target nucleic acid.

[0188] In some embodiments, the present invention provides a system, the system comprising:
[0189] (a) a CRISPR-Cas effector fusion protein comprising a CRISPR-Cas effector protein domain fused to a peptide tag;
[0190] (b) an Agrobacterium effector fusion protein comprising an Agrobacterium effector protein domain fused to an affinity polypeptide that is capable of interacting with the peptide tag;
[0191] (c) optionally a T-DNA sequence; and
[0192] (d) a CRISPR guide nucleic acid comprising a spacer sequence and a repeat sequence, wherein the guide nucleic acid is capable of forming a complex with the CRISPR-Cas effector protein domain of the CRISPR-Cas fusion protein and the spacer sequence is capable of hybridizing to a target nucleic acid, thereby guiding the CRISPR-Cas fusion protein to the target nucleic acid, wherein the peptide tag of the CRISPR-Cas fusion protein interacts with the affinity polypeptide of the Agrobacterium effector fusion protein and optionally the Agrobacterium effector protein domain associates with (covalently links to, e.g., VirD2, non-covalently with, e.g., VirE2)) the T-DNA (if present), thereby recruiting the Agrobacterium effector protein domain and optionally the T-DNA to the CRISPR-Cas effector protein domain and to the target nucleic acid, whereby the system is capable of modifying the target nucleic acid.

[0193] In some embodiments, the present invention provides a system, the system comprising:
[0194] (a) an Agrobacterium effector protein domain;
[0195] (b) a CRISPR-Cas effector fusion protein comprising a CRISPR-Cas effector protein domain fused to an affinity polypeptide that is capable of interacting with the Agrobacterium effector protein domain (e.g., an antibody to the Agrobacterium effector domain);
[0196] (c) optionally a T-DNA sequence; and
[0197] (d) a CRISPR guide nucleic acid comprising a spacer sequence and a repeat sequence, wherein the guide nucleic acid is capable of forming a complex with the CRISPR-Cas effector protein domain of the CRISPR-Cas fusion protein and the spacer sequence is capable of hybridizing to a target nucleic acid, thereby guiding the CRISPR-Cas fusion protein to the target nucleic acid, wherein the affinity polypeptide of the CRISPR-Cas fusion protein interacts with the Agrobacterium effector protein domain and optionally the Agrobacterium effector protein domain associates with the T-DNA (if present), thereby recruiting the Agrobacterium effector protein domain and optionally the T-DNA to the CRISPR-Cas effector protein domain and to the target nucleic acid, whereby the system is capable of modifying the target nucleic acid.

[0198] In some embodiments, the polypeptides and/or polynucleotides of this invention may be delivered to a cell or target nucleic acid separately or in any combination. Two or more polynucleotides of the invention may be under the control of the same promoter (using, for example P2A peptides to separate the domains) or they may be under the control of different promoters. In some embodiments, a guide nucleic acid of this invention may be expressed in the same expression cassette as one or more of the polypeptides of the invention and/or under the same or a different promoter as any one of the polypeptides.

[0199] In some embodiments, a T-DNA (also referred to interchangeably as a T-DNA sequence) may be delivered on a T-DNA plasmid. When the T-DNA is delivered on plasmid, rather than via an Agrobacterium strain modified to carry the T-DNA, a VirD1 polypeptide/domain may also be introduced into and expressed in the cell, wherein the introduced VirD1 and VirD2 are capable of generating the T-DNA sequence from the plasmid. In some embodiments, a method and/or system of the present invention does not include delivering a T-DNA to a cell.

[0200] In some embodiments, a T-DNA sequence may be delivered via an engineered Agrobacterium strain modified to carry the T-DNA. In some embodiments, the same or a different Agrobacterium strain may be used to deliver a T-DNA than the strain used to deliver a bacterial transfer protein (e.g., an Agrobacterium effector protein (e.g., VirD2, VirE2)), a fusion protein as described herein, a nucleic acid binding polypeptide, and/or a guide nucleic. In some embodiments, an engineered Agrobacterium strain may be modified to comprise a fusion protein as described herein, a bacterial transfer protein, a nucleic acid binding polypeptide (e.g., a nucleic acid binding polypeptide such as a CRISPR-Cas effector protein) and/or a guide nucleic acid. In some embodiments, an engineered Agrobacterium strain comprises and/or expresses a fusion protein as described herein, a bacterial transfer protein, a nucleic acid binding polypeptide (e.g., a nucleic acid binding polypeptide such as a CRISPR-Cas effector protein) and/or a guide nucleic acid. In some embodiments, an engineered Agrobacterium strain may be modified to comprise a fusion protein as described herein, a bacterial transfer protein, a nucleic acid binding polypeptide (e.g., a nucleic acid binding polypeptide such as a CRISPR-Cas effector protein), a guide nucleic acid, and/or a T-DNA (e.g., a T-DNA comprising an edit and/or repair template) on the same or different T-DNA sequences each other.

[0201] In some embodiments, one or more of the polypeptides, one or more of the polynucleotides, one or more of the expression cassettes, and/or one or more of the vectors of the invention may be comprised in one or more engineered Agrobacterium strains for delivering to a cell. In some embodiments, two or more (e.g., 2, 3, 4, or more) different engineered Agrobacterium strains are used in a composition, system, and/or method of the present invention. For example, a first engineered Agrobacterium strain may express and/or encode a fusion protein as described herein and a second engineered Agrobacterium strain may comprise a guide nucleic acid and/or express and/or encode a nucleic acid binding protein. An engineered Agrobacterium strain may comprise, express, and/or encode a fusion protein as described herein, a nucleic acid binding protein, and/or a bacterial transfer protein and/or comprise a guide nucleic acid. In some embodiments, an engineered Agrobacterium strain may encode a fusion protein as described herein, a nucleic acid binding protein, and/or a bacterial transfer protein and/or comprise a guide nucleic acid on the same plasmid (e.g., a tumor-inducing plasmid or another plasmid) or different plasmids. For example, a tumor-inducing plasmid of an Agrobacterium cell may comprise a guide nucleic acid and optionally a T-DNA and a separate plasmid of the Agrobacterium cell may encode for a fusion protein, a nucleic acid binding protein, and/or a bacterial transfer protein, optionally wherein the fusion protein, nucleic acid binding protein, and/or bacterial transfer protein are expressed in the Agrobacterium cell. In some embodiments, a fusion protein as described herein, a nucleic acid binding protein, a bacterial transfer protein, and/or a guide nucleic acid are present in an Agrobacterium cell and optionally one or more is present in the form of a complex (e.g., a ribonucleoprotein complex). An engineered Agrobacterium strain may be devoid of and/or have knocked out a wild-type bacterial transfer protein (e.g., a wild-type Agrobacterium virulence protein). For example, an engineered Agrobacterium strain may have VirD2 knocked out. In some embodiments, an engineered Agrobacterium strain may be a disarmed Agrobacterium strain. A “disarmed Agrobacterium strain” as used herein refers to an Agrobacterium strain that has been modified compared to its native sequence and/or structure so that introduction of a polypeptide and/or polynucleotide from the strain into a plant cell cannot cause and/or provide the hairy root and/or tumor phenotype in the plant cell.

[0202] In some embodiments, the present invention provides an engineered Agrobacterium strain comprising a bacterial transfer protein (e.g., an Agrobacterium effector protein sequence) fused to a recruiting motif (e.g., an affinity polypeptide or a peptide tag). In some embodiments, a bacterial transfer protein is an Agrobacterium effector protein such as an Agrobacterium virulence protein. In some embodiments, the Agrobacterium virulence protein may be a virD2 polypeptide or domain thereof, or a virE2 polypeptide or domain thereof.

[0203] In some embodiments, a nucleic acid binding polypeptide (e.g., a sequence-specific DNA binding protein such as a CRISPR-Cas effector protein) and a guide nucleic acid may be delivered as a preassembled ribonucleoprotein (RNP). In some embodiments, a guide nucleic acid and a fusion protein comprising a nucleic acid binding polypeptide (e.g., a sequence-specific DNA binding protein such as a CRISPR-Cas effector protein) may be delivered as a preassembled RNP. In some embodiments, a nucleic acid binding polypeptide (e.g., a sequence-specific DNA binding protein such as a CRISPR-Cas effector protein), a fusion protein of the present invention, a bacterial transfer protein, T-DNA and/or a guide nucleic acid may be delivered using an engineered Agrobacterium strain optionally carrying expression cassettes encoding one or more of the nucleic acid binding polypeptide, fusion protein of the present invention, bacterial transfer protein, T-DNA and/or guide nucleic acid.

[0204] The invention further provides methods for modifying a target nucleic, the methods comprising contacting a target nucleic acid or a cell comprising the target nucleic acid (when using Agrobacterium for delivery) with a fusion protein, composition, system, or complex of the invention. The methods may be carried out in an in vivo system (e.g., in a cell or in an organism) or in an in vitro system (e.g., cell free).

[0205] In some embodiments, a method of modifying a target nucleic acid comprises contacting the target nucleic acid with a composition of the invention capable of interacting with (binding) the target nucleic acid in a sequence specific manner, thereby modifying the target nucleic acid. In some embodiments, the method comprises recruiting to the target nucleic acid at least one T-DNA sequence comprising a nucleic acid sequence to be edited into the target nucleic acid (e.g., a template such as a repair template).

[0206] In some embodiments, the present invention provides a method of modifying a target nucleic acid in a plant, the method comprising contacting a target nucleic acid with (a) a domain that is capable of interacting with a T-DNA sequence (e.g., an Agrobacterium effector protein), (b) (i) a nucleic acid binding polypeptide or (ii) a domain that is capable of interacting with the nucleic acid binding polypeptide (e.g., an affinity polypeptide (e.g., a polypeptide capable of binding a peptide tag)), and (c) optionally a T-DNA sequence.

[0207] In some embodiments, the methods of the invention further comprise contacting a target nucleic acid with a CRISPR guide nucleic acid (e.g., crRNA, crDNA). In some embodiments, a CRISPR guide nucleic acid of the invention may be linked to an RNA recruiting motif.

[0208] In some embodiments, a method of modifying a target nucleic acid is provided, the method comprising contacting the target nucleic acid with: (a) a nucleic acid binding polypeptide; (b) a DNA-dependent DNA polymerase; (c) optionally a T-DNA sequence comprising a primer binding site with complementarity to the sequence of a nicked target DNA strand; and (d) optionally a guide nucleic acid (e.g., CRISPR RNA, CRISPR DNA, crRNA, crDNA), thereby modifying the target nucleic acid. In some embodiments, the primer binding site may be located on the 3′ end of the T-DNA sequence. In some embodiments, the primer binding site may be at least about 90% complementarity to the target nucleic acid. In some embodiments, the guide nucleic acid may be linked to an RNA recruiting motif and the DNA-dependent DNA polymerase may be fused to an affinity polypeptide that is capable of binding the RNA recruiting motif.

[0209] In some embodiments, a method of the invention may comprise contacting a target nucleic acid with a CRISPR-Cas effector protein and a guide nucleic acid, wherein the CRISPR-Cas effector protein is a nickase (e.g., nCas9, nCas12a) that nicks and/or that is configured to nick a (first) site on the first strand of the target nucleic acid that is located about 10 to about 125 base pairs (either 5′ or 3′) from a site on the second strand that has been nicked by the Type V CRISPR-Cas effector protein, thereby improving mismatch repair, wherein the CRISPR-Cas effector protein is a Type I, Type II, Type III, Type IV, or Type V CRISPR-Cas effector protein.

[0210] In some embodiments, the invention provides a method of modifying a target nucleic acid, the method comprising: contacting the target nucleic acid at a first target site with (a)(i) a first CRISPR-Cas effector protein; and (ii) a first T-DNA sequence; and (b)(i) a second CRISPR-Cas effector protein, (ii) a DNA-dependent DNA polymerase; and (ii) a first guide nucleic acid, thereby modifying the target nucleic acid. In some embodiments, the CRISPR nucleic acid of the first guide nucleic acid may comprise a spacer sequence that binds to a second site on the first strand of the target nucleic acid that is upstream of the first site on the second strand of the target nucleic acid. In some embodiments, the T-DNA may be recruited to the target nucleic acid as described herein.

[0211] In some embodiments, the methods of the invention may further comprise contacting the target nucleic acid with (a) a third CRISPR-Cas effector protein; and (b) a second guide nucleic acid, wherein the third CRISPR-Cas effector protein nicks a site on the first strand of the target nucleic acid that is located about 10 to about 125 base pairs (either 5′ or 3′) from a second site on the second strand that has been nicked by the second CRISPR-Cas effector protein, thereby improving mismatch repair.

[0212] In some embodiments, the methods of the invention may further comprise contacting the target nucleic acid with (a) a fourth CRISPR-Cas effector protein; (b) a second DNA-dependent DNA polymerase, and (c) a second T-DNA sequence, wherein the second T-DNA sequence is designed to target a site on the first strand of the target nucleic acid, thereby modifying the target nucleic acid.

[0213] A first guide nucleic acid of the invention may comprise a CRISPR nucleic acid (CRISPR RNA, CRISPR DNA, crRNA, crDNA). In some embodiments, the CRISPR nucleic acid of the first guide nucleic acid may comprises a spacer sequence that binds to a second site on the first strand of the target nucleic acid that is upstream of the first site on the second strand of the target nucleic acid.

[0214] In some embodiments, a second CRISPR-Cas effector protein may be a CRISPR-Cas fusion protein comprising a CRISPR-Cas effector protein domain fused to a DNA-dependent DNA polymerase. In some embodiments, a second CRISPR-Cas effector protein may be a CRISPR-Cas fusion protein comprising a CRISPR-Cas effector protein domain fused to a peptide tag and the DNA-dependent DNA polymerase is a DNA-dependent DNA polymerase fusion protein comprising a DNA-dependent DNA polymerase domain fused to an affinity polypeptide capable of binding the peptide tag.

[0215] In some embodiments, a first guide nucleic acid may be linked to an RNA recruiting motif and the DNA-dependent DNA polymerase may be a DNA-dependent DNA polymerase fusion protein comprising a DNA-dependent DNA polymerase domain fused to an affinity polypeptide capable of binding the RNA recruiting motif.

[0216] In some embodiments, a method of the invention may comprise contacting a target nucleic acid with a 5′-3′ exonuclease. In some embodiments, the 5′-3′ exonuclease may be fused to a CRISPR-Cas effector protein (e.g., a first CRISPR-Cas effector protein). In some embodiments, the 5′-3′ exonuclease may be a fusion protein comprising the 5′-3′ exonuclease fused to a peptide tag and a CRISPR-Cas effector protein may be fused to an affinity polypeptide that is capable of binding to the peptide tag. In some embodiments, a 5′-3′ exonuclease may be a fusion protein comprising the 5′-3′ exonuclease fused to an affinity polypeptide that is capable of binding to the peptide tag and a CRISPR-Cas effector protein may be fused to a peptide tag. In some embodiments, a 5′-3′ exonuclease may be a fusion protein comprising the 5′-3′ exonuclease fused to an affinity polypeptide that is capable of binding to an RNA recruiting motif and a guide nucleic acid may be linked to the RNA recruiting motif.

[0217] In some embodiments, a method of the present invention comprises reducing double strand breaks by introducing a chemical inhibitor of non-homologous end joining (NHEJ), by introducing a CRISPR guide nucleic acid and/or an siRNA targeting an NHEJ protein to transiently knock-down expression of the NHEJ protein, and/or by introducing a polypeptide that prevents NHEJ (e.g., a Gam protein).

[0218] In some embodiments, a first CRISPR-Cas effector protein, a second CRISPR-Cas effector protein, a third CRISPR-Cas effector protein and/or a fourth CRISPR-Cas effector protein may be a Type I, Type II, Type III, Type IV, or Type V CRISPR-Cas effector protein, in any combination.

[0219] In some embodiments, a domain that is capable of interacting with a T-DNA sequence may be an Agrobacterium effector protein. In some embodiments, an Agrobacterium effector protein comprises an Agrobacterium polypeptide that is capable of being used to recruit a T-DNA to a target site as described herein. In some embodiments, an Agrobacterium effector protein may be an Agrobacterium virulence polypeptide or domain thereof. In some embodiments, an Agrobacterium effector protein may be a VirD2 polypeptide or domain thereof. In some embodiments, an Agrobacterium effector protein may be aVirE2 polypeptide or domain thereof.

[0220] In some embodiments, an Agrobacterium effector protein may be an Agrobacterium effector fusion protein. In some embodiments, an Agrobacterium effector fusion protein may comprise an Agrobacterium effector protein domain fused/associated with (a) a nucleic acid binding polypeptide (e.g., a sequence-specific DNA binding domain (e.g., a CRISPR-Cas effector protein, a zinc finger effector protein, and/or a transcription activator-like effector (TALE) protein)), or (b) a domain capable of interacting with the nucleic acid binding polypeptide (e.g., a recruiting RNA motif; an affinity polypeptide). In some embodiments, a nucleic acid binding polypeptide or a domain capable of interacting with the s nucleic acid binding polypeptide may be fused/associated with the N-terminus or C-terminus of an Agrobacterium effector protein. In some embodiments, a nucleic acid binding polypeptide or a domain capable of interacting with a nucleic acid binding polypeptide may be incorporated within the primary sequence of the Agrobacterium effector protein.

[0221] In some embodiments of the invention, a nucleic acid binding polypeptide may be a CRISPR-Cas effector protein, zinc finger effector protein, meganuclease, and/or a transcription activator-like effector (TALE) protein, optionally wherein the nucleic acid binding polypeptide maybe a fusion protein.

[0222] In some embodiments, a nucleic acid binding polypeptide may be a CRISPR-Cas effector protein, optionally wherein the CRISPR-Cas effector protein may be from a Type I CRISPR-Cas system, a Type II CRISPR-Cas system, a Type III CRISPR-Cas system, a Type IV CRISPR-Cas system, Type V CRISPR-Cas system, or a Type VI CRISPR-Cas system. In some embodiments, a CRISPR-Cas effector protein of the invention may be from a Type II CRISPR-Cas system or a Type V CRISPR-Cas system. In some embodiments, a CRISPR-Cas effector protein may be Type II CRISPR-Cas effector protein, for example, a Cas9 effector protein. In some embodiments, a CRISPR-Cas effector protein may be Type V CRISPR-Cas effector protein, for example, a Cas12 effector protein.

[0223] CRISPR-Cas effector proteins for editing are commonly engineered to comprise a nuclear localization signal (NLS) on the C-terminus and/or the N-terminus. In some embodiments, a CRISPR-Cas effector protein may be present and/or expressed at a relatively high concentration in a target cell relative to a complex comprising a T-DNA sequence and anAgrobacterium effector protein (e.g., VirD2/T-DNA complex, VirE2/T-DNA complex). In order to avoid competition between the T-DNA sequence/Agrobacterium effector protein complex and free CRISPR-Cas effector protein for target binding in the nucleus of a cell, an NLS-lacking CRISPR protein may be expressed and/or provided in the plant cells instead of a CRISPR-Cas effector protein with an engineered NLS. In some embodiments, a NLS-lacking CRISPR-Cas effector proteins may be engineered with an affinity polypeptide (e.g., a scFv antibody domain) against a specified epitope (e.g., a peptide tag) that will be fused to the Agrobacterium effector protein (e.g., VirD2, VirE2). NLS-lacking CRISPR-Cas effector proteins may be retained in the cytoplasm until non-covalently recruited to VirD2 through antibody/epitope interaction. After which they may be transported into the nucleus with VirD2 through the nuclear pore system, using the NLS signal of VirD2.

[0224] In addition to strategies that utilize non-covalently recruitment, VirD2:Cpf1 and VirE2:Cpf1 fusions may be used for co-delivery of a T-DNA complex and Cpf1 into a plant cell. This strategy may have the advantage that it bypasses the step of VirD2 and VirE2 antibody fusions to find the Cpf1:epitope counterpart. Therefore, it may promote the translocation of the T-DNA complex to specific genomic site.

[0225] Stoichiometry of proteins within a plant nucleus may play a role in the recruitment of a fusion protein, bacterial transfer protein, and/or CRISPR-Cas effector protein to target nucleic acid. For example, stoichiometry of proteins within the plant nucleus may play a role in the recruitment of a VirD2/VirE2 T-DNA complex by a CRISPR-Cas effector protein to specific genomic sites. One strategy to promote a 1:1 ratio of VirD2 or VirE2 proteins and Cpf1 in the nucleus may be the recruitment of Cpf1:epitope by VirD2:antibody or VirE2:antibody in the plant cytosol. To achieve this, a Cpf1:epitope fusion lacking a nuclear localization signal (NLS) can be recruited by either VirD2:antibody or VirE2:antibody in the cytosol and can be co-imported into the nucleus. In some embodiments, plant cells can be transformed by Agrobacterium carrying the modified VirD2 or VirE2 antibody, recruitment domain or epitope fusions. An expression cassette encoding the Cpf1:antibody, recruitment domain or epitope fusion lacking the NLS sequence may be delivered together with a guide cassette into the plant nucleus on the T-DNA. The expression cassette can include a visual marker, e.g. ZsGreen that can be co delivered on the T-DNA to assist in identifying successful transformations. The successful import of Cpf1 into the plant nucleus can be verified by molecular screening for editing at the Cpf1 target site in the plant genome.

[0226] In some embodiments, an antibody:VirD2:A3A fusion, a Cpf1:epitope and a crRNA cassette targeting a known CRISPR base editing site may be co-expressed in human cells. Detection of base editing activity in the DNA at that target demonstrates recruitment of Vir proteins.

[0227] In some embodiments, a T-DNA/VirD2 or VirE2 associated complex may be recruited to a specific genomic site with CRISPR proteins. In this strategy, T-DNA production comprises a DNA molecule with left and right border sequences and the virulence proteins VirD1 and VirD2. Heterologous production of T-DNA complexes has been achieved in E. coli and plant cells and in vitro using these components. T-DNA complexes manufactured in vitro have been shown to locate to the nuclease of human cells. On this basis, T-DNA complex recruitment could be tested heterologously in human or plant cells by co-expressing VirD1, VirD2 fused to a recruitment domain, and optionally, VirE2, and simultaneously delivering a DNA molecule containing the left and right border sequences.

[0228] In some embodiments, a nucleic acid binding polypeptide may be a zinc finger effector protein. In some embodiments, a nucleic acid binding polypeptide may be a meganuclease. In some embodiments, a nucleic acid binding polypeptide may be a transcription activator-like effector (TALE) protein. In some embodiments, a nucleic acid binding polypeptide may be an argonaute protein.

[0229] In some embodiments, a nucleic acid binding polypeptide may be a sequence-specific DNA binding fusion protein. In some embodiments of the invention, a sequence-specific DNA binding fusion protein may comprise a nucleic acid binding polypeptide fused to a peptide tag or to an affinity polypeptide, optionally wherein the affinity polypeptide is capable of interacting with (e.g., binding) a peptide tag or a domain that is capable of interacting with a T-DNA sequence (e.g., the affinity polypeptide may be, for example, an antibody capable of binding an Agrobacterium effector protein). In some embodiments, a domain that is capable of interacting with a nucleic acid binding polypeptide may be a peptide tag or an affinity polypeptide, optionally wherein the affinity polypeptide is capable of interacting with (e.g., binding) a peptide tag or with an RNA recruiting motif.

[0230] In some embodiments, a sequence-specific DNA binding fusion protein may be a CRISPR-Cas effector fusion protein that comprises a CRISPR-Cas effector domain fused to an Agrobacterium effector protein/domain.

[0231] In some embodiments, an Agrobacterium effector protein may be an Agrobacterium effector fusion protein. In some embodiments, an Agrobacterium effector fusion protein may comprise an Agrobacterium effector protein domain fused to a peptide tag and/or an Agrobacterium effector protein domain fused to an affinity polypeptide that is capable of binding a peptide tag. In some embodiments, an Agrobacterium effector fusion protein may comprise an Agrobacterium effector protein domain fused to a peptide tag and a sequence-specific DNA binding fusion protein may be a CRISPR-Cas effector fusion protein that comprises a CRISPR-Cas effector domain fused to an affinity polypeptide, which affinity polypeptide is capable of binding the peptide tag, wherein the CRISPR-Cas effector fusion protein is capable binding to the target nucleic acid, and the Agrobacterium effector protein is recruited to the target nucleic acid by the association of the peptide tag with the affinity polypeptide (optionally thereby recruiting any T-DNA associated with the Agrobacterium effector protein to the target nucleic acid). In some embodiments, a sequence-specific DNA binding fusion protein may be a CRISPR-Cas effector fusion protein that comprises an CRISPR-Cas effector protein domain fused to a peptide tag and a Agrobacterium effector fusion protein may comprise an Agrobacterium effector protein domain fused to an affinity polypeptide that is capable of binding the peptide tag, wherein the CRISPR-Cas effector fusion protein is capable binding to the target nucleic acid and the Agrobacterium effector protein is recruited to the target nucleic acid by the association of the peptide tag with the affinity polypeptide (optionally thereby recruiting any T-DNA associated with the Agrobacterium effector protein to the target nucleic acid).

[0232] In some embodiments, the invention provides a CRISPR guide nucleic acid linked to an RNA recruiting motif and an Agrobacterium effector fusion protein that comprises an Agrobacterium effector protein domain fused to an affinity polypeptide that is capable of binding the RNA recruiting motif, optionally wherein the RNA recruiting motif is linked to the 5′ end or to the 3′ end of the CRISPR nucleic acid, wherein the RNA recruiting motif of the CRISPR guide nucleic acid is capable of recruiting the Agrobacterium effector fusion protein to a target nucleic acid to which the CRISPR-Cas guide nucleic acid is capable of binding (optionally thereby recruiting any T-DNA associated with the Agrobacterium effector protein to the target nucleic acid).

[0233] In some embodiments, the invention provides a T-DNA sequence for introducing a modification or edit. In some embodiments, a T-DNA of the invention may have a length of about 400 nucleotides to about 30,000 nucleotides (e.g., about 400, 410, 420, 430, 440, 450, 460, 470, 480, 490, 500, 510, 520, 530, 540, 550, 560, 570, 580, 590, 600, 610, 620, 630, 640, 650, 660, 670, 680, 690, 700, 710, 720, 730, 740, 750, 760, 770, 780, 790, 800, 810, 820, 830, 840, 850, 860, 870, 880, 890, 900, 910, 920, 930, 940, 950, 960, 970, 980, 990, 1000, 1100, 1200, 1300, 1400, 1500, 1600, 1700, 1800, 1900, 2000, 2500, 3000, 3500, 4000, 4500, 5000, 5500, 6000, 6500, 7000, 7500, 8000, 8500, 9000, 9500, 10,000, 10,500, 11,000, 11,500, 12,000, 12,500, 13,000, 13,500, 14,000, 14,500, 15,000, 15,500, 16,000, 16,500, 17,000, 17,500, 18,000, 18,500, 19,000, 19,500, 20,000, 20,500, 21,000, 21,500, 22,000, 22,500, 23,000, 23,500, 24,000, 24,500, 25,000, 25,500, 26,000, 26,500, 27,000, 27,500, 28,000, 28,500, 29,000, 29,500, 30,000 nucleotides or more in length, or any value or range therein). Thus, in some embodiments, a T-DNA of this invention may be about 400, 410, 420, 430, 440, 450, 460, 470, 480, 490, 500, 510, 520, 530, 540, 550, 560, 570, 580, 590, 600, 610, 620, 630, 640, 650, 660, 670, 680, 690, 700, 710, 720, 730, 740, 750, 760, 770, 780, 790, 800, 810, 820, 830, 840, 850, 860, 870, 880, 890, 900, 910, 920, 930, 940, 950, 960, 970, 980, 990, 1000 nucleotides to about 1100, 1200, 1300, 1400, 1500, 1600, 1700, 1800, 1900, 2000, 2500, 3000, 3500, 4000, 4500, 5000, 5500, 6000, 6500, 7000, 7500, 8000, 8500, 9000, 9500, or 10,000 nucleotides or more in length, or any value or range therein, or about 400, 410, 420, 430, 440, 450, 460, 470, 480, 490, 500, 510, 520, 530, 540, 550, 560, 570, 580, 590, 600, 610, 620, 630, 640, 650, 660, 670, 680, 690, or 700 nucleotides to about 710, 720, 730, 740, 750, 760, 770, 780, 790, 800, 810, 820, 830, 840, 850, 860, 870, 880, 890, 900, 910, 920, 930, 940, 950, 960, 970, 980, 990, 1000, 1100, 1200, 1300, 1400, 1500, 1600, 1700, 1800, 1900, 2000, 2500, 3000, 3500, 4000, 4500, or 5000 nucleotides or more in length, or any value or range therein. In some embodiments, a T-DNA of this invention may be about 1000, 1100, 1200, 1300, 1400, 1500, 1600, 1700, 1800, 1900, 2000, 2500, 3000, 3500, 4000, 4500, 5000, 5500, 6000, 6500, 7000, 7500, 8000, 8500, 9000, 9500, or 10,000 nucleotides to about 10,500, 11,000, 11,500, 12,000, 12,500, 13,000, 13,500, 14,000, 14,500, 15,000, 15,500, 16,000, 16,500, 17,000, 17,500, 18,000, 18,500, 19,000, 19,500, 20,000, 20,500, 21,000, 21,500, 22,000, 22,500, 23,000, 23,500, 24,000, 24,500, 25,000, 25,500, 26,000, 26,500, 27,000, 27,500, 28,000, 28,500, 29,000, 29,500, or 30,000 nucleotides or more in length, or any value or range therein or about.

[0234] In some embodiments, a T-DNA that is useful with the methods of this invention may be a single stranded sequence (ssT-DNA) or it may be a double stranded sequence (dsT-DNA).

[0235] In some embodiments, a T-DNA sequence may comprise a 3′ homology region (e.g., 3′ homology arm) and/or 5′ homology region (e.g., 5′ homology arm), wherein the 3′ homology region and/or 5′ homology region may comprise sequence complementarity to a target nucleic acid (e.g., a target site). In some embodiments, a T-DNA sequence may comprise a 3′ homology region (e.g., arm) having homology to the target nucleic acid but no 5′ homology arm. In some embodiments, the length of a 3′ homology region and/or a 5′ homology region may be about 4 nucleotides to about 1000 nucleotides (e.g., about 4, 5, 6, 7, 8, 9, 10, 11, 12, 13, 14, 15, 16, 17, 18, 19, 20, 21, 22, 23, 24, 25, 26, 27, 28, 29, 30, 31, 32, 33, 34, 35, 36, 37, 38, 39, 40, 41, 42, 43, 44, 45, 46, 47, 48, 49, 50, 51, 52, 53, 54, 55, 56, 57, 58, 59, 60, 61, 62, 63, 64, 65, 66, 67, 68, 69, 70, 71, 72, 73, 74, 75, 76, 77, 78, 79, 80, 81, 82, 83, 84, 85, 86, 87, 88, 89, 90, 91, 92, 93, 94, 95, 96, 97, 98, 99, 100, 110, 120, 130, 140, 150, 160, 170, 180, 190, 200, 210, 220, 230, 240, 250, 260, 270, 280, 290, 300, 310, 320, 330, 340, 350, 360, 370, 380, 390, 400, 410, 420, 430, 440, 450, 460, 470, 480, 490, 500, 510, 520, 530, 540, 550, 560, 570, 580, 590, 600, 610, 620, 630, 640, 650, 660, 670, 680, 690, 700, 710, 720, 730, 740, 750, 760, 770, 780, 790, 800, 810, 820, 830, 840, 850, 860, 870, 880, 890, 900, 910, 920, 930, 940, 950, 960, 970, 980, 990, or 1000 nucleotides in length, or any value or range therein), optionally about 30 nucleotides to about 1000 nucleotides in length (e.g., about 30, 31, 32, 33, 34, 35, 36, 37, 38, 39, 40, 41, 42, 43, 44, 45, 46, 47, 48, 49, 50, 51, 52, 53, 54, 55, 56, 57, 58, 59, 60, 61, 62, 63, 64, 65, 66, 67, 68, 69, 70, 71, 72, 73, 74, 75, 76, 77, 78, 79, 80, 81, 82, 83, 84, 85, 86, 87, 88, 89, 90, 91, 92, 93, 94, 95, 96, 97, 98, 99, 100, 110, 120, 130, 140, 150, 160, 170, 180, 190, 200, 210, 220, 230, 240, 250, 260, 270, 280, 290, 300, 310, 320, 330, 340, 350, 360, 370, 380, 390, 400, 410, 420, 430, 440, 450, 460, 470, 480, 490, 500, 510, 520, 530, 540, 550, 560, 570, 580, 590, 600, 610, 620, 630, 640, 650, 660, 670, 680, 690, 700, 710, 720, 730, 740, 750, 760, 770, 780, 790, 800, 810, 820, 830, 840, 850, 860, 870, 880, 890, 900, 910, 920, 930, 940, 950, 960, 970, 980, 990, or 1000 nucleotides in length, or any value or range therein). Thus, in some embodiments, the length of a 3′ homology region and/or a 5′ homology region of a T-DNA of this invention may be about 4, 5, 6, 7, 8, 9, 10, 11, 12, 13, 14, 15, 16, 17, 18, 19, 20, 21, 22, 23, 24, 25, 26, 27, 28, 29, 30, 31, 32, 33, 34, 35, 36, 37, 38, 39, 40, 41, 42, 43, 44, 45, 46, 47, 48, 49, 50, 51, 52, 53, 54, 55, 56, 57, 58, 59, 60, 61, 62, 63, 64, 65, 66, 67, 68, 69, 70, 71, 72, 73, 74, 75, 76, 77, 78, 79, 80, 81, 82, 83, 84, 85, 86, 87, 88, 89, 90, 91, 92, 93, 94, 95, 96, 97, 98, 99, 100, 110, 120, 130, 140, 150, 160, 170, 180, 190, 200, 210, 220, 230, 240, 250, 260, 270, 280, 290, 300, 310, 320, 330, 340, 350, 360, 370, 380, 390, or 400 nucleotides to about 410, 420, 430, 440, 450, 460, 470, 480, 490, 500, 510, 520, 530, 540, 550, 560, 570, 580, 590, 600, 610, 620, 630, 640, 650, 660, 670, 680, 690, 700, 710, 720, 730, 740, 750, 760, 770, 780, 790, 800, 810, 820, 830, 840, 850, 860, 870, 880, 890, 900, 910, 920, 930, 940, 950, 960, 970, 980, 990, or 1000 nucleotides, and any range or value therein; about 20, 21, 22, 23, 24, 25, 26, 27, 28, 29, 30, 31, 32, 33, 34, 35, 36, 37, 38, 39, 40, 41, 42, 43, 44, 45, 46, 47, 48, 49, 50, 51, 52, 53, 54, 55, 56, 57, 58, 59, 60, 61, 62, 63, 64, 65, 66, 67, 68, 69, 70, 71, 72, 73, 74, 75, 76, 77, 78, 79, 80, 81, 82, 83, 84, 85, 86, 87, 88, 89, 90, 91, 92, 93, 94, 95, 96, 97, 98, 99, or 100 nucleotides to about 110, 120, 130, 140, 150, 160, 170, 180, 190, 200, 210, 220, 230, 240, 250, 260, 270, 280, 290, 300, 310, 320, 330, 340, 350, 360, 370, 380, 390, 400, 410, 420, 430, 440, 450, 460, 470, 480, 490, 500, 510, 520, 530, 540, 550, 560, 570, 580, 590, or 600 nucleotides, and any range or value therein; or about 30, 31, 32, 33, 34, 35, 36, 37, 38, 39, 40, 41, 42, 43, 44, 45, 46, 47, 48, 49, 50, 51, 52, 53, 54, 55, 56, 57, 58, 59, 60, 61, 62, 63, 64, 65, 66, 67, 68, 69, 70, 71, 72, 73, 74, 75, 76, 77, 78, 79, 80, 81, 82, 83, 84, 85, 86, 87, 88, 89, 90, 91, 92, 93, 94, 95, 96, 97, 98, 99, or 100 nucleotides to about 110, 120, 130, 140, 150, 160, 170, 180, 190, 200, 210, 220, 230, 240, 250, 260, 270, 280, 290, 300, 310, 320, 330, 340, 350, 360, 370, 380, 390, 400, 410, 420, 430, 440, 450, 460, 470, 480, 490, 500, 510, 520, 530, 540, 550, 560, 570, 580, 590, 600, 610, 620, 630, 640, 650, 660, 670, 680, 690, 700, 710, 720, 730, 740, or 750 nucleotides, and any range or value therein.

[0236] In some embodiments, the complementarity of a 3′ homology region and/or a 5′ homology region of a T-DNA to a target nucleic acid may be at least about 80% (e.g., about 80, 81, 82, 83, 84, 85, 86, 87, 88, 89, 90, 91, 92, 93, 94, 95, 96, 97, 98, 99, 99.5, 99.6, 99.7, 99.8, 99.9, or 100% complementarity, or any value or range therein) across about 4 to about 1000 consecutive nucleotides as described herein. In some embodiments, complementarity of the 3′ homology region and/or 5′ homology region to a target nucleic acid may be about 85% to about 100%, about 90% to about 100%, about 95% to 100%, about 96% to about 100%, about 97% to about 100%, about 98% to about 100%, about 99% to about 100%, or at least about 99.5%, 99.6%, 99.7%, 99.8%, or 99.9%.

[0237] In some embodiments, a T-DNA sequence of the invention may comprise an edit for incorporation into the target nucleic acid located in the 5′ direction relative to the 3′ homology region, and in the 3′ direction relative to the 5′ homology region, when a 5′ homology arm is present.

[0238] In some embodiments of the invention, a T-DNA may comprise a primer binding site having complementarity to the 3′ end of a nick in a genomic target site. This embodiment is somewhat like a template for prime editing, wherein the nicked target strand primes the T-DNA as a template and a DNA-dependent DNA polymerase incorporates the T-DNA sequence into the target. In this configuration, homology regions may be present or may not be present. The DNA-dependent DNA polymerase could be endogenous, or could be transgenic (introduced) and be generally overexpressed in the host cell.

[0239] In some embodiments, a primer binding site on a T-DNA sequence may comprise a length of about 4 to about 30 nucleotides or more (e.g., about 4, 5, 6, 7, 8, 9, 10, 11, 12, 13, 14, 15, 16, 17, 18, 19, 20, 21, 22, 23, 24, 25, 26, 27, 28, 29, 30 nucleotides or more, or any range or value therein). A primer binding site useful with a T-DNA sequence of this invention may be a nucleotide sequence having sufficient complementarity to a target nucleic acid such that it can bind to the target nucleic acid (e.g., about 90% to about 100% complementarity to a target nucleic acid; e.g., about 90, 91, 92, 93, 94, 95, 96, 97, 98, 99, 99.5, 99.6, 99.7, 99.8, 99.9, or 100% complementarity, or any value or range therein). Thus, a primer binding site on a T-DNA as described herein can act as a primer to a nicked genomic strand (e.g., nicked by a sequence specific DNA binding domain comprising nickase activity) of a target nucleic acid, thereby bringing an edit located on the T-DNA sequence within proximity of the target nucleic acid for use with a DNA-dependent polymerase and nucleic acid binding polypeptide for incorporating the edit into the target nucleic acid.

[0240] In some embodiments, a T-DNA sequence may comprise an edit for incorporation into a target nucleic acid, the edit being located in the 5′ direction relative to the primer binding site of the T-DNA.

[0241] In some embodiments, a T-DNA sequence of this invention may comprise a 3′ microhomologous sequence and a 5′ microhomologous sequence, wherein the 3′ microhomologous sequence and the 5′ microhomologous sequence have a length of about 3 consecutive nucleotides to about 30 consecutive nucleotides having complementarity to the target nucleic acid (e.g., about 3, 4, 5, 6, 7, 8, 9, 10, 11, 12, 13, 14, 15, 16, 17, 18, 19, 20, 21, 22, 23, 24, 25, 26, 27, 28, 29, 30 nucleotides in length or any range or value therein; optionally about 4 nucleotides to about 30 nucleotides in length, or about 3 nucleotides to about 25 nucleotides in length or any range or value therein). In some embodiments, a 3′ microhomologous sequence and a 5′ microhomologous sequence may have complementarity to a sequence in the target nucleic acid (e.g., about 90% to about 100% complementarity to a target nucleic acid; e.g., about 90, 91, 92, 93, 94, 95, 96, 97, 98, 99, 99.5, 99.6, 99.7, 99.8, 99.9, or 100% complementarity, or any value or range therein) across about 3 to about 30 consecutive nucleotides. In some embodiments, a T-DNA sequence of this invention comprising a 3′ microhomologous sequence and a 5′ microhomologous sequence may comprise an edit for incorporation into the target locus located in the 5′ direction relative to the 3′ microhomologous sequence and in the 3′ direction relative to the 5′ microhomologous sequence.

[0242] In some embodiments of the invention, a T-DNA sequence may be configured to integrate via non-homologous end-joining (NHEJ). In some embodiments, a T-DNA sequence for integration via NHEJ does not comprise a 3′ homology region or a 5′ homology region. In some embodiments, a T-DNA sequence for use in NHEJ may comprise a 3′ microhomologous sequence and a 5′ microhomologous sequence as described herein.

[0243] In some embodiments, a guide nucleic acid may be linked to an RNA recruiting motif, and a polypeptide to be recruited to the guide nucleic acid (and to a target nucleic acid) may be a fusion protein that is fused (linked) to an affinity polypeptide, which is capable of binding the RNA recruiting motif that is linked to the guide. For example, a guide nucleic acid may be linked to an RNA recruiting motif, and a DNA dependent DNA polymerase may be a fusion protein comprising a DNA dependent DNA polymerase domain fused (linked) to an affinity polypeptide that binds to the RNA recruiting motif, optionally wherein the target nucleic acid is contacted with two or more DNA dependent DNA polymerase fusion proteins.

[0244] As another example, a CRISPR guide nucleic acid may be fused to an RNA recruiting motif and an Agrobacterium effector fusion protein comprising an Agrobacterium effector protein domain may be fused to an affinity polypeptide that is capable of binding the RNA recruiting motif, wherein the CRISPR guide is capable of interacting with the Agrobacterium effector fusion protein, thereby the CRISPR guide nucleic acid recruits the Agrobacterium effector fusion protein to the target site that the CRISPR guide nucleic acid is capable of binding (through its complementary spacer sequence).

[0245] In some embodiments of the invention, a guide RNA may be linked to one or to two or more RNA recruiting motifs (e.g., 1, 2, 3, 4, 5, 6, 7, 8, 9, 10 or more motifs; e.g., at least 10 to about 25 motifs), optionally wherein the two or more RNA recruiting motifs may be the same RNA recruiting motif or different RNA recruiting motifs.

[0246] In some embodiments, a peptide tag useful with this invention can include, but is not limited to, a GCN4 peptide tag (e.g., Sun-Tag), a c-Myc affinity tag, an HA affinity tag, a His affinity tag, an S affinity tag, a methionine-His affinity tag, an RGD-His affinity tag, a FLAG octapeptide, a strep tag or strep tag II, a V5 tag, and/or a VSV-G epitope. In some embodiments, the peptide tag may be a GCN4 peptide tag. In some embodiments, a peptide tag may comprise two or more copies of the peptide tag (e.g., a peptide repeat; e.g., two or more tandem copies; e.g., tandem copies of GCN4).

[0247] In some embodiments, an affinity polypeptide can include, but is not limited to, an antibody, optionally a scFv antibody that is capable of binding a peptide tag (e.g., a GCN4 peptide tag, a c-Myc affinity tag, an HA affinity tag, a His affinity tag, an S affinity tag, a methionine-His affinity tag, an RGD-His affinity tag, a FLAG octapeptide, a strep tag or strep tag II, a V5 tag, and/or a VSV-G epitope).

[0248] In some embodiments, an RNA recruiting motif may be linked to the 5′ end or to the 3′ end of the CRISPR nucleic acid to provide a recruiting crRNA/recruiting crDNA. In some embodiments, an RNA recruiting motif and its corresponding affinity polypeptide (e.g., affinity polypeptide that is capable of binding the RNA recruiting motif) can include, but is not limited to, a telomerase Ku binding motif (e.g., Ku binding hairpin) and the affinity polypeptide of Ku (e.g., Ku heterodimer); a telomerase Sm7 binding motif and the affinity polypeptide of Sm7; an MS2 phage operator stem-loop and the affinity polypeptide MS2 Coat Protein (MCP), a PP7 phage operator stem-loop and the affinity polypeptide PP7 Coat Protein (PCP); an SfMu phage Com stem-loop and the affinity polypeptide Com RNA binding protein; a PUF binding site (PBS) and the affinity polypeptide Pumilio/fem-3 mRNA binding factor (PUF); and/or a synthetic RNA-aptamer and the corresponding aptamer ligand. In some embodiments, the RNA recruiting motif and its corresponding affinity polypeptide may be an MS2 phage operator stem-loop and the affinity polypeptide MS2 Coat Protein (MCP), and/or a PUF binding site (PBS) and the affinity polypeptide Pumilio/fem-3 mRNA binding factor (PUF).

[0249] In some embodiments, the polypeptides of the invention (e.g., a domain that is capable of interacting with a T-DNA sequence, a nucleic acid binding polypeptide, a domain that is capable of interacting with the nucleic acid binding polypeptide, a CRISPR-Cas effector protein, a zinc finger effector protein, a transcription activator-like effector (TALE) protein, a CRISPR-Cas effector fusion protein/domain, a Agrobacterium effector protein, a Agrobacterium fusion protein, a peptide tag, and/or an affinity polypeptide) may be encoded by one or more polynucleotides. In some embodiments, the one or more polynucleotides may be comprised in one or more expression cassettes and/or one or more vectors. Thus, a domain that is capable of interacting with a T-DNA sequence may be encoded by a polynucleotide, a nucleic acid binding polypeptide may be encoded by a polynucleotide, a domain that is capable of interacting with the nucleic acid binding polypeptide may be encoded by a polynucleotide, a CRISPR-Cas effector protein may be encoded by a polynucleotide, a zinc finger effector protein may be encoded by a polynucleotide, a transcription activator-like effector (TALE) protein may be encoded by a polynucleotide, a CRISPR-Cas effector fusion protein/domain may be encoded by a polynucleotide, a Agrobacterium effector protein may be encoded by a polynucleotide, a Agrobacterium fusion protein may be encoded by a polynucleotide, a peptide tag may be encoded by a polynucleotide, and/or an affinity polypeptide may be encoded by a polynucleotide.

[0250] In some embodiments, a polynucleotide encoding a domain that is capable of interacting with a T-DNA sequence, a polynucleotide encoding a nucleic acid binding polypeptide, a polynucleotide encoding a domain that is capable of interacting with the nucleic acid binding polypeptide, a polynucleotide encoding a CRISPR-Cas effector protein, a polynucleotide encoding the zinc finger effector protein, a polynucleotide encoding a TALE protein, a polynucleotide encoding a CRISPR-Cas effector fusion protein/domain, a polynucleotide encoding an Agrobacterium effector protein, a polynucleotide encoding an Agrobacterium effector fusion protein, a polynucleotide encoding a peptide tag, a polynucleotide encoding an affinity polypeptide, a polynucleotide comprising T-DNA sequence, and/or a polynucleotide comprising a guide nucleic acid may be comprised in one or more expression cassettes. In some embodiments, the polypeptides and nucleic acids of the invention may be encoded by/comprised in one or more polynucleotides and the one or more polynucleotides may be comprised in the same or separate expression cassettes in any combination. In some embodiments, when comprised in a single expression cassette, the polynucleotides may be operably linked to a single promoter or to any combination of separate promoters.

[0251] An expression cassette of the present invention may be comprised in one or more vectors to be delivered to an organism and/or a cell, for example, an animal (e.g., a mammal, an insect, a fish, and the like), a plant (e.g., a dicot plant, a monocot plant), a bacterium, an archaeon, and the like).

[0252] In some embodiments, a polynucleotide, expression cassette and/or vector of the invention may be codon optimized for expression in an organism (e.g., an animal, a plant, a bacterium, an archaeon, and the like). In some embodiments, the polynucleotides, expression cassettes, and/or vectors may be codon optimized for expression in a plant, optionally a dicot plant or a monocot plant.

[0253] In some embodiments, the polynucleotides, nucleic acid constructs, expression cassettes or vectors of the invention that are optimized for expression in an organism (e.g., a plant) may be about 70% to 100% identical (e.g., about 70%, 71%, 72%, 73%, 74%, 75%, 76%, 77%, 78%, 79%, 80%, 81%, 82%, 83%, 84%, 85%, 86%, 87%, 88%, 89%, 90%, 91%, 92%, 93%, 94%, 95%, 96%, 97%, 98%, 99%, 99.5% or 100%) to the polynucleotides, nucleic acid constructs, expression cassettes or vectors encoding the same but which have not been codon optimized for expression in the organism (e.g., the plant).

[0254] The nucleic acid constructs of the invention and/or guide nucleic acids may be comprised in one or more expression cassettes as described herein. In some embodiments, a nucleic acid construct of the invention may be comprised in the same or in a separate expression cassette or vector from that comprising a guide nucleic acid.

[0255] As described herein, the nucleic acids of the invention and/or expression cassettes and/or vectors comprising the same may be codon optimized for expression in an organism. An organism useful with this invention may be any organism or cell thereof for which nucleic acid modification may be useful. An organism can include, but is not limited to, any animal, any plant, any fungus, any archaeon, or any bacterium. In some embodiments, the organism may be a plant or cell thereof.

[0256] In some embodiments, an expression cassette of the invention may be codon optimized for expression in a dicot plant or it may be codon optimized for expression in a monocot plant. In some embodiments, the expression cassettes of the invention may be used in a method of modifying a target nucleic acid in a plant or plant cell, the method comprising introducing one or more expression cassettes of the invention into the plant or plant cell, thereby modifying the target nucleic acid in the plant or plant cell to produce a plant or plant cell comprising the modified target nucleic acid. In some embodiments, an expression cassette and/or vector of the invention may be introduced via an engineered Agrobacterium comprising one or more of the polynucleotides, expression cassettes and/or vectors of the invention. In some embodiments, the method may further comprise regenerating the plant cell that comprises the modified target nucleic acid to produce a plant comprising the modified target nucleic acid.

[0257] In some embodiments, the nucleic acid constructs, expression cassettes or vectors of the invention that are optimized for expression in a plant may be about 70% to 100% identical (e.g., about 70%, 71%, 72%, 73%, 74%, 75%, 76%, 77%, 78%, 79%, 80%, 81%, 82%, 83%, 84%, 85%, 86%, 87%, 88%, 89%, 90%, 91%, 92%, 93%, 94%, 95%, 96%, 97%, 98%, 99%, 99.5% or 100%) to the nucleic acid constructs, expression cassettes or vectors comprising the same polynucleotide(s) but which have not been codon optimized for expression in a plant.

[0258] A target nucleic acid of any plant or plant part may be modified using the nucleic acid constructs of the invention. Any plant (or groupings of plants, for example, into a genus or higher order classification) may be modified using a polypeptide and/or polynucleotide of the present invention including an angiosperm, a gymnosperm, a monocot, a dicot, a C3, C4, CAM plant, a bryophyte, a fern and/or fern ally, a microalgae, and/or a macroalgae. A plant and/or plant part useful with this invention may be a plant and/or plant part of any plant species/variety/cultivar. The term “plant part,” as used herein, includes but is not limited to, embryos, pollen, ovules, seeds, leaves, stems, shoots, flowers, branches, fruit, kernels, ears, cobs, husks, stalks, roots, root tips, anthers, plant cells including plant cells that are intact in plants and/or parts of plants, plant protoplasts, plant tissues, plant cell tissue cultures, plant calli, plant clumps, and the like. As used herein, “shoot” refers to the above ground parts including the leaves and stems. Further, as used herein, “plant cell” refers to a structural and physiological unit of the plant, which comprises a cell wall and also may refer to a protoplast. A plant cell can be in the form of an isolated single cell or can be a cultured cell or can be a part of a higher-organized unit such as, for example, a plant tissue or a plant organ.

[0259] In some embodiments, when a plant part or plant cell is stably transformed, it can then be used to regenerate a stably transformed plant comprising one or more modifications as described herein using the compositions and methods of the invention.

[0260] Non-limiting examples of plants useful with the present invention include turf grasses (e.g., bluegrass, bentgrass, ryegrass, fescue), feather reed grass, tufted hair grass, miscanthus, arundo, switchgrass, vegetable crops, including artichokes, kohlrabi, arugula, leeks, asparagus, lettuce (e.g., head, leaf, romaine), malanga, melons (e.g., muskmelon, watermelon, crenshaw, honeydew, cantaloupe), cole crops (e.g., brussels sprouts, cabbage, cauliflower, broccoli, collards, kale, chinese cabbage, bok choy), cardoni, carrots, napa, okra, onions, celery, parsley, chick peas, parsnips, chicory, peppers, potatoes, cucurbits (e.g., marrow, cucumber, zucchini, squash, pumpkin, honeydew melon, watermelon, cantaloupe), radishes, dry bulb onions, rutabaga, eggplant, salsify, escarole, shallots, endive, garlic, spinach, green onions, squash, greens, beet (sugar beet and fodder beet), sweet potatoes, chard, horseradish, tomatoes, turnips, and spices; a fruit crop such as apples, apricots, cherries, nectarines, peaches, pears, plums, prunes, cherry, quince, fig, nuts (e.g., chestnuts, pecans, pistachios, hazelnuts, pistachios, peanuts, walnuts, macadamia nuts, almonds, and the like), citrus (e.g., clementine, kumquat, orange, grapefruit, tangerine, mandarin, lemon, lime, and the like), blueberries, black raspberries, boysenberries, cranberries, currants, gooseberries, loganberries, raspberries, strawberries, blackberries, grapes (wine and table), avocados, bananas, kiwi, persimmons, pomegranate, pineapple, tropical fruits, pomes, melon, mango, papaya, and lychee, a field crop plant such as clover, alfalfa, timothy, evening primrose, meadow foam, corn/maize (field, sweet, popcorn), hops, jojoba, buckwheat, safflower, quinoa, wheat, rice, barley, rye, millet, sorghum, oats, triticale, sorghum, tobacco, kapok, a leguminous plant (beans (e.g., green and dried), lentils, peas, soybeans), an oil plant (rape, canola, mustard, poppy, olive, sunflower, coconut, castor oil plant, cocoa bean, groundnut, oil palm), duckweed, Arabidopsis, a fiber plant (cotton, flax, hemp, jute), Cannabis (e.g., Cannabis sativa, Cannabis indica, and Cannabis ruderalis), lauraceae (cinnamon, camphor), or a plant such as coffee, sugar cane, tea, and natural rubber plants; and/or a bedding plant such as a flowering plant, a cactus, a succulent and/or an ornamental plant (e.g., roses, tulips, violets), as well as trees such as forest trees (broad-leaved trees and evergreens, such as conifers; e.g., elm, ash, oak, maple, fir, spruce, cedar, pine, birch, cypress, eucalyptus, willow), as well as shrubs and other nursery stock. In some embodiments, the nucleic acid constructs of the invention and/or expression cassettes and/or vectors encoding the same may be used to modify maize, soybean, wheat, canola, rice, cotton, tomato, pepper, sunflower, raspberry, blackberry, black raspberry and/or cherry.

[0261] In some embodiments, the invention provides cells (e.g., plant cells, animal cells, bacterial cells, archaeon cells, and the like) comprising one or more polynucleotides, guide nucleic acids, nucleic acid constructs, expression cassettes or vectors of the invention.

[0262] The present invention further comprises a kit or kits to carry out the methods of this invention. A kit of this invention can comprise reagents, buffers, and apparatus for mixing, measuring, sorting, labeling, etc., as well as instructions and the like as would be appropriate for modifying a target nucleic acid.

[0263] In some embodiments, the invention provides a kit comprising one or more and/or polypeptides of the invention and/or one or more polynucleotides of the invention (nucleic acid constructs) and/or expression cassettes and/or vectors comprising the same, with optional instructions for the use thereof. In some embodiments, a kit may comprise a CRISPR-Cas guide nucleic acid (corresponding to a CRISPR-Cas effector protein of the invention) and/or expression cassettes and/or vectors comprising the same. In some embodiments, a guide nucleic acid may be provided on the same expression cassette and/or vector as one or more nucleic acid constructs of the invention. In some embodiments, the guide nucleic acid may be provided on a separate expression cassette or vector from that comprising the one or more nucleic acid constructs of the invention.

[0264] In some embodiments, kits are provided comprising a nucleic acid construct comprising (a) a polynucleotide(s) as provided herein and (b) a promoter that drives expression of the polynucleotide(s) of (a). In some embodiments, the kit may further comprise a nucleic acid construct encoding a guide nucleic acid, wherein the construct comprises a cloning site for cloning of a nucleic acid sequence identical or complementary to a target nucleic acid sequence into backbone of the guide nucleic acid.

[0265] In some embodiments, a nucleic acid construct of the invention may be an mRNA that may encode one or more introns within the encoded polynucleotide(s). In some embodiments, the nucleic acid constructs of the invention and/or an expression cassettes and/or vectors comprising the same, may further encode one or more selectable markers useful for identifying transformants (e.g., a nucleic acid encoding an antibiotic resistance gene, herbicide resistance gene, and the like).

### Embodiments of the Present Invention May be Further Described by the Below Clauses

[0266] Clause 1. A composition comprising a domain fused to a recruiting motif (e.g., an affinity polypeptide or a peptide tag), wherein the domain is capable of interacting with a T-DNA sequence.

[0267] Clause 2. A composition comprising a nucleic acid binding polypeptide (e.g., a sequence-specific DNA binding domain) fused to a recruiting motif (e.g., an affinity polypeptide or a peptide tag), wherein the recruiting motif is capable of binding a domain that is capable of interacting with a T-DNA sequence (e.g., the recruiting motif may bind to the same or a different portion of the domain than the portion of the domain that interacts with the T-DNA sequence).

[0268] Clause 3. A composition comprising a domain that is capable of interacting with a T-DNA sequence fused to:
[0269] (i) a nucleic acid binding polypeptide (e.g., a sequence-specific DNA binding domain); and/or
[0270] (ii) a domain that is capable of interacting with a nucleic acid binding polypeptide (e.g., an affinity polypeptide (e.g., a polypeptide capable of binding a peptide tag)).

[0271] Clause 4. A composition comprising a nucleic acid binding polypeptide (e.g., a sequence-specific DNA binding domain) fused to an affinity polypeptide, wherein the affinity polypeptide is capable of binding a domain that is capable of interacting with a T-DNA sequence, optionally wherein the affinity polypeptide is an antibody capable of binding an Agrobacterium effector protein.

[0272] Clause 5. The composition of any one of clauses 1 to 4, further comprising a CRISPR guide nucleic acid.

[0273] Clause 6. The composition of any one of the preceding clauses, wherein the domain that is capable of interacting with a T-DNA sequence is an Agrobacterium effector protein.

[0274] Clause 7. The composition of clause 6, wherein the Agrobacterium effector protein is an Agrobacterium effector fusion protein.

[0275] Clause 8. The composition of clause 6 or clause 7, wherein the Agrobacterium effector protein is an Agrobacterium virulence polypeptide, optionally wherein the Agrobacterium virulence polypeptide is a polypeptide of virD2 and/or virE2.

[0276] Clause 9. The composition of any one of clauses 2 to 8, wherein the nucleic acid binding polypeptide is a CRISPR-Cas effector protein, zinc finger effector protein, meganuclease, and/or a transcription activator-like effector (TALE) protein, optionally wherein the nucleic acid binding polypeptide is a fusion protein.

[0277] Clause 10. The composition of any one of clauses 2 to 9, wherein the nucleic acid binding polypeptide is a CRISPR-Cas effector protein, optionally wherein the CRISPR-Cas effector protein does not comprise a nuclear localization signal (NLS).

[0278] Clause 11. The composition of clause 10, wherein the CRISPR-Cas effector protein is from a Type I CRISPR-Cas system, a Type II CRISPR-Cas system, a Type III CRISPR-Cas system, a Type IV CRISPR-Cas system or a Type V CRISPR-Cas system.

[0279] Clause 12. The composition clause 10 or clause 11, wherein the CRISPR-Cas effector protein is from a Type II CRISPR-Cas system or a Type V CRISPR-Cas system.

[0280] Clause 13. The composition of any one of clauses 10 to 12, wherein the CRISPR-Cas effector protein is a Cas9 effector protein or a Cas12 effector protein.

[0281] Clause 14. The composition of any one of clauses 10 to 13, wherein the CRISPR-Cas effector protein is a CRISPR-Cas effector fusion protein.

[0282] Clause 15. The composition of clause 14, wherein the CRISPR-Cas effector fusion protein comprises a CRISPR-Cas effector protein fused to an Agrobacterium effector protein.

[0283] Clause 16. The composition of any one of clauses 7 to 14, wherein the Agrobacterium effector fusion protein comprises an Agrobacterium effector protein fused to a peptide tag and the CRISPR-Cas effector fusion protein comprises a CRISPR-Cas effector protein fused to an affinity polypeptide that is capable of binding the peptide tag.

[0284] Clause 17. The composition of any one of clauses 7 to 14, wherein the CRISPR-Cas effector fusion protein comprises an CRISPR-Cas effector protein fused to a peptide tag and the Agrobacterium effector fusion protein comprises an Agrobacterium effector protein fused to an affinity polypeptide that is capable of binding the peptide tag.

[0285] Clause 18. The composition of any one of clauses 5 to 17, wherein the CRISPR guide nucleic acid is fused to an RNA recruiting motif and the Agrobacterium effector fusion protein comprises an Agrobacterium effector protein fused to an affinity polypeptide that is capable of binding the RNA recruiting motif.

[0286] Clause 19. The composition of any one of clauses 1 to 18, wherein the composition further comprises a T-DNA sequence.

[0287] Clause 20. The composition of clause 19, wherein the T-DNA sequence has a length of about 400 nucleotides to about 30,000 nucleotides.

[0288] Clause 21. The composition of clause 19 or clause 20, wherein the T-DNA sequence is a single stranded sequence (ssT-DNA).

[0289] Clause 22. The composition of clause 19 or clause 20, wherein the T-DNA sequence is a double stranded sequence (dsT-DNA).

[0290] Clause 23. The composition of any one of clauses 19 to 22, wherein the T-DNA sequence comprises a 5′ homology region (e.g., homology arm) and/or 3′ homology region having sequence complementarity to a target nucleic acid (e.g., target site).

[0291] Clause 24. The composition of clause 23, wherein the 5′ homology region and/or the 3′ homology region of the T-DNA sequence has a length of about 4 nucleotides to about 1000 nucleotides.

[0292] Clause 25. The composition of clause 23 or clause 24, wherein the T-DNA sequence comprises an edit for incorporation into the target nucleic acid located in the 5′ direction relative to the 3′ homology region, and in the 3′ direction relative to the 5′ homology region, when present.

[0293] Clause 26. The composition of any one of clauses 19 to 22, wherein a primer binding site is located on the 3′ end of the T-DNA sequence, optionally wherein the primer binding site has a length of about 4 to about 30 nucleotides or more.

[0294] Clause 27. The composition of clause 26, wherein the T-DNA sequence comprises an edit for incorporation into the target nucleic acid located in the 5′ direction relative to the primer binding site.

[0295] Clause 28. The composition of any one of clauses 19 to 22, wherein the T-DNA sequence comprises a 3′ microhomologous sequence and a 5′ microhomologous sequence. Clause 29. The composition of clause 28, wherein the 3′ microhomologous sequence and the 5′ microhomologous sequence each have a length of about 3 nucleotides to about 30 nucleotides having complementarity to the target nucleic acid.

[0296] Clause 30. The composition of clause 28 or clause 29, wherein the T-DNA sequence comprises an edit for incorporation into the target locus located in the 5′ direction relative to the 3′ microhomologous sequence and in the 3′ direction relative to the 5′ microhomologous sequence.

[0297] Clause 31. The composition of any one of clauses 19 to 22, wherein the T-DNA sequence is configured to integrate via non-homologous end-joining.

[0298] Clause 32. The composition of any one of clauses 2 to 32, wherein the peptide tag comprises a GCN4 peptide tag (e.g., Sun-Tag), a c-Myc affinity tag, an HA affinity tag, a His affinity tag, an S affinity tag, a methionine-His affinity tag, an RGD-His affinity tag, a FLAG octapeptide, a strep tag or strep tag II, a V5 tag, and/or a VSV-G epitope.

[0299] Clause 33. The composition of any one of clauses 2 to 31, wherein the peptide tag comprises a GCN4 peptide tag (e.g., Sun-Tag).

[0300] Clause 34. The composition of any one of clauses 2 to 33, wherein the peptide tag comprises two or more copies (e.g., two or more tandem copies) of the peptide tag.

[0301] Clause 35. The composition of any one of clauses 2 to 17 or 19 to 34, wherein the affinity polypeptide is an antibody, optionally a scFv antibody.

[0302] Clause 36. The composition of any one of clauses 18 to 35, wherein the RNA recruiting motif is linked to the 5′ end or to the 3′ end of the CRISPR nucleic acid (e.g., a recruiting crRNA, a recruiting crDNA).

[0303] Clause 37. The composition of any one of clauses 18 to 36, wherein the RNA recruiting motif and a corresponding affinity polypeptide are a telomerase Ku binding motif (e.g., Ku binding hairpin) and the affinity polypeptide of Ku (e.g., Ku heterodimer); a telomerase Sm7 binding motif and the affinity polypeptide of Sm7; an MS2 phage operator stem-loop and the affinity polypeptide MS2 Coat Protein (MCP), a PP7 phage operator stem-loop and the affinity polypeptide PP7 Coat Protein (PCP); an SfMu phage Com stem-loop and the affinity polypeptide Com RNA binding protein; a PUF binding site (PBS) and the affinity polypeptide Pumilio/fem-3 mRNA binding factor (PUF); and/or a synthetic RNA-aptamer and the corresponding aptamer ligand.

[0304] Clause 38. The composition of any one of clauses 18 to 37, wherein the RNA recruiting motif and corresponding affinity polypeptide are an MS2 phage operator stem-loop and the affinity polypeptide MS2 Coat Protein (MCP), and/or a PUF binding site (PBS) and the affinity polypeptide Pumilio/fem-3 mRNA binding factor (PUF).

[0305] Clause 39. The composition of any one of clauses 1 to 38, wherein the domain that is capable of interacting with a T-DNA sequence is encoded by a polynucleotide, the nucleic acid binding polypeptide is encoded by a polynucleotide, the domain that is capable of interacting with the nucleic acid binding polypeptide is encoded by a polynucleotide, the CRISPR-Cas effector protein is encoded by a polynucleotide, the zinc finger effector protein is encoded by a polynucleotide, the transcription activator-like effector (TALE) protein is encoded by a polynucleotide, the CRISPR-Cas effector fusion protein is encoded by a polynucleotide, the Agrobacterium effector protein is encoded by a polynucleotide, the Agrobacterium fusion protein is encoded by a polynucleotide, the peptide tag is encoded by a polynucleotide, and/or the affinity polypeptide is encoded by a polynucleotide.

[0306] Clause 40. The composition of clause 39, wherein the polynucleotide encoding the polynucleotide encoding the domain that is capable of interacting with a T-DNA sequence, the polynucleotide encoding the nucleic acid binding polypeptide, the polynucleotide encoding the domain that is capable of interacting with the nucleic acid binding polypeptide, the polynucleotide encoding the CRISPR-Cas effector protein, the polynucleotide encoding the zinc finger effector protein, the polynucleotide encoding the TALE protein, the polynucleotide encoding the CRISPR-Cas effector fusion protein, the polynucleotide encoding the Agrobacterium effector protein, the polynucleotide encoding the Agrobacterium fusion protein, the polynucleotide encoding the peptide tag, and/or the polynucleotide encoding the affinity polypeptide are comprised in one or more expression cassettes.

[0307] Clause 41. The composition of clause 39 or clause 40, wherein the polynucleotide encoding the domain that is capable of interacting with a T-DNA sequence, the polynucleotide encoding the nucleic acid binding polypeptide, the polynucleotide encoding the domain that is capable of interacting with the nucleic acid binding polypeptide, the polynucleotide encoding the CRISPR-Cas effector protein, the polynucleotide encoding the zinc finger effector protein, the polynucleotide encoding the TALE protein, the polynucleotide encoding the CRISPR-Cas effector fusion protein, the polynucleotide encoding the Agrobacterium effector protein, the polynucleotide encoding the Agrobacterium effector fusion protein, the polynucleotide encoding the peptide tag, and/or the polynucleotide encoding the affinity polypeptide are comprised in one or more expression cassettes, wherein when comprised in one expression cassette, the polynucleotides are operably linked to a single promoter or to any combination of separate promoters.

[0308] Clause 42. The composition of clause 40 or clause 4l, wherein the one or more expression cassettes are comprised in one or more vectors.

[0309] Clause 43. The composition of any one of clauses 39 to 42, wherein the polynucleotides, the one or more expression cassettes and/or the one or more vectors are codon optimized for expression in a plant.

[0310] Clause 44. A method of modifying a target nucleic acid in a plant, comprising contacting the target nucleic acid with the composition of any one of the clauses 2 to 43, thereby recruiting to a target nucleic acid a T-DNA comprising a nucleic acid sequence to be edited into the target nucleic acid, optionally wherein the T-DNA comprises a template (e.g., a repair template) that is used in modifying the target nucleic acid.

[0311] Clause 45. The method of clause 44, wherein one or more of the polynucleotides, one or more of the expression cassettes, and/or one or more of the vectors are comprised in one or more engineered Agrobacterium cells.

[0312] Clause 49. The method of clause 45, wherein a cell comprising the target nucleic acid is contacted with the one or more engineered Agrobacterium cells.

[0313] The invention will now be described with reference to the following examples. It should be appreciated that these examples are not intended to limit the scope of the claims to the invention, but are rather intended to be exemplary of certain embodiments. Any variations in the exemplified methods that occur to the skilled artisan are intended to fall within the scope of the invention.

### Examples

### Example 1: Cas12a Recruitment by VirD2

### Construct Design

[0314] Gene expression of modified and unmodified virD2 was either driven by the constitutive J23102 promoter (SEQ ID NO:77) fused to a 3′ ribosomal binding site, or the ubiquitin 2 promoter from Medicago truncatula (SEQ ID NO:1), transcription was terminated by the T7 early terminator (T7TE) (SEQ ID NO:78). The virD2 coding sequence from Agrobacterium tumefaciens C58 Ti-plasmid was fused to optimized coding sequences for gene expression in Agrobacterium tumefaciens. For N-terminal fusions of binding domains to VirD2 included a BE4 linker sequence (SEQ ID NOs:75 and 76). C-terminal fusions to VirD2 were fused via short serine/glycine linkers between amino acid 373 and 374 of VirD2 (SEQ ID NOs: 78 and 79). Alternatively, binding domains were fused between the C-terminal end of VirD2 and a VirF C-terminus (SEQ ID NO:165) from the A. tumefaciens C58 Ti-plasmid. A VirD2 deficient A. tumefaciens strain was transformed with plasmid encoded vird2 expression cassettes and T-DNA encoding a plant optimized zsgreen and cas12a expression cassette as well as a Cas12a guide cassette regulated by a plant U6 promoter. The Cas12a spacer (SEQ ID NO:61) was designed to target the two gene copies of phytoene desaturase (pds) in Nicotiona benthamiana. The cas2a gene was designed without nuclear localization sequences to ensure a cytosolic localization of the protein within the plant cell after biosynthesis. The various Cas12a designs and plasmids are provided in Table 1.

TABLE 1
Cas12a Recruitment Treatments and Corresponding Plasmids

| Treatment | Delivered Plasmids |
|---|---|
| VirD2::scFV (SEQ ID NO: 170) + | pWISE3093 (SEQ ID NO: 160) + pWISE3121 |
| 8xGCN4::Cas12a (SEQ ID NO: 173) | (SEQ ID NO: 161) |
| VirD2::8xGCN4 (SEQ ID NO: 175) + | pWISE3092 (SEQ ID NO: 133) + pWISE3117 |
| scFV::Cas12a (SEQ ID NO: 174) | (SEQ ID NO: 162) |
| scFv::VirD2 (SEQ ID NO: 177) + | pWISE3098 (SEQ ID NO: 159) + pWISE3107 |
| Cas12a::8xGCN4 (SEQ ID NO: 176) | (SEQ ID NO: 163) |
| 8xGCN4::VirD2 (SEQ ID NO: 178) + | pWISE3097 (SEQ ID NO: 117) + pWISE3103 |
| Cas12a::scFV (SEQ ID NO: 179) | (SEQ ID NO: 123) |
| VirD2-ScFv-VirF (SEQ ID NO: 180) + | pWISE3093 (SEQ ID NO: 160) + pWISE3114 |
| 8xGCN4-Cas12a (SEQ ID NO: 173) | (SEQ ID NO: 164) |
| VirD2::8xGCN4::VirF (SEQ ID | pWISE3092 (SEQ ID NO: 133) + pWISE3110 |
| NO: 181) + scFv::Cas12a (SEQ ID | (SEQ ID NO: 79) |
| NO: 174) | |
| SH3dom::VirD2 (SEQ ID NO: 182) + | pWISE3096 (SEQ ID NO: 132) + pWISE3108 |
| Cas12a::4xSH3lig (SEQ ID NO: 183) | (SEQ ID NO: 82) |
| 4xSH3lig::VirD2 (SEQ ID NO: 184) + | pWISE3095 (SEQ ID NO: 116) + pWISE3109 |
| Cas12a::SH3dom (SEQ ID NO: 185) | (SEQ ID NO: 122) |
| VirD2::SH3dom (SEQ ID NO: 185) + | pWISE3091 (SEQ ID NO: 115) + pWISE3122 |
| 4xSH3lig::Cas12a (SEQ ID NO: 187) | (SEQ ID NO: 121) |
| VirD2::SH3lig (SEQ ID NO: 188) + | pWISE3090 (SEQ ID NO: 137) + pWISE3123 |
| SH3dom::Cas12a (SEQ ID NO: 189) | (SEQ ID NO: 136) |
| VirD2::SH3dom::VirF (SEQ ID | pWISE3091 (SEQ ID NO: 115) + pWISE3115 |
| NO: 190) + 4xSH3lig::Cas12a (SEQ ID | (SEQ ID NO: 120) |
| NO: 187) | |
| VirD2::4xSH3lig::VirF (SEQ ID | pWISE3090 (SEQ ID NO: 137) + pWISE3116 |
| NO: 191) + SH3dom::Cas12a (SEQ ID | (SEQ ID NO: 159) |
| NO: 189) | |
| C-intein::VirD2 (SEQ ID NO: 192) + | pWISE3094 (SEQ ID NO: 131) + pWISE3106 |
| Cas12a::N-intein (SEQ ID NO: 193) | (SEQ ID NO: 128) |
| VirD2::N-intein::VirF (SEQ ID | pWISE3089 (SEQ ID NO: 134) + pWISE3113 |
| NO: 194) + C-intein::Cas12a (SEQ ID | (SEQ ID NO: 130) |
| NO: 195) | |
| VirD2 (SEQ ID NO: 168) + ZsGreen | pWISE711 (SEQ ID NO: 124) + pWISE3030 |
| Complementation Control | (SEQ ID NO: 119) |
| Editing control | pWISE768 (SEQ ID NO: 118) + pWISE711 |
| | (SEQ ID NO: 124) |
| Cas12a-no NLS (SEQ ID NO: 196) + | pWISE3115 (SEQ ID NO: 120) + pWISE3088 |
| VirD2::SH3dom::VirF (SEQ ID | (SEQ ID NO: 135) |
| NO: 190) | |

Validation of VirD2 Functionality Through Delivery of a Zsgreen Encoding T-DNA to Plant cell nucleus

[0315] Leaves of four-week-old Nicotiana benthamiana plants were infiltrated with A. tumefaciens overnight cultures (OD₆₀₀ₙₘ of 0.7 in infiltration buffer: 10 mM MES, 10 mM MgCl₂, 100 uM acetosyringone, pH 5.6). Validation of VirD2 functionality by delivery of a zsgreen encoding T-DNA into the plant cells was done via fluorescent microscopy 10-11 days post infiltration (dpi). Green fluorescent leaves were sampled and gDNA was extracted for deep amplicon sequencing. FIG. 1 shows an example for successful T-DNA encoded zsgreen delivery by modified VirD2 into the plant cell nucleus. Fluorescent microscopy pictures were taken 10-11 days after infiltration.

[0316] To prove that Cas12a was secreted, genomic DNA was extracted from 50 mg fluorescent N. benthamiana leaf tissue using the Plant DNeasy Mini Kit (Qiagen) or the DNeasy 96 Plant Kit (Qiagen). Samples were analyzed by deep amplicon sequencing for insertions and deletions (INDELs) at the pds target site. INDEL frequency of recruited Cas12a is shown in FIG. 2.

### Example 2: Simultaneous Delivery of Protein (Cas12a) and RNA (crRNA) into a Eukaryotic Cell (Yeast or Plant)

### Construct Design

[0317] Plasmid pWSE3452 (SEQ ID NO:80) (containing an agrobacterium expression cassette for Cas12a::VirD2 driven by the VirB Operon promoter (SEQ ID NO:58)) or plasmid pWSE3111 (SEQ ID NO:125) (containing an agrobacterium expression cassette for VirD2::Cas2a::VirF driven by the synthetic BbaJ23102 promoter (SEQ ID NO:54) was used as the backbone for insertion of crRNA expression cassettes. An agrobacterium expression cassette is shown in FIG. 3, which was synthesized on the BioXP3250 and cloned into either pWISE3452 or pWISE3111 at the SmaI restriction site via Gibson assembly. Table 2 contains a description of the vectors used for the Agrobacterium RNP delivery experiments.

TABLE 2
Description of Vectors used in the Agrobacterium RNP Delivery Experiments.

| | | Editing | | | Cas12a | Parent | |
|---|---|---|---|---|---|---|---|
| | pWISE | Target | Spacer | RE Site | Configuration | Backbone | Purpose |
| 1 | pWISE3452 | N/A | N/A | N/A | Cas12a::VirD2 | N/A | Negative |
| | (SEQ ID | | | | (SEQ ID NO: 66) | | Control |
| | NO: 80) | | | | | | |
| 2 | pWISE3897 | Yeast | PWsp1409 | EcoRV | Cas12a::VirD2 | pWISE3452 | Test |
| | (SEQ ID | URA3 | (SEQ ID | | (SEQ ID NO: 66) | (SEQ ID | Vector |
| | NO: 143) | | NO: 0) | | | NO: 80) | |
| 3 | pWISE3898 | Yeast | PWsp1410 | NcoI | Cas12a::VirD2 | pWISE3452 | Test |
| | (SEQ ID | URA3 | (SEQ ID | | (SEQ ID NO: 66) | (SEQ ID | Vector |
| | NO: 144) | | NO: 10) | | | NO: 80) | |
| 4 | pWISE3899 | Tobacco | PWsp365 | N/A | Cas12a::VirD2 | pWISE3452 | Test |
| | (SEQ ID | PDS | (SEQ ID | | (SEQ ID NO: 66) | (SEQ ID | Vector |
| | NO: 139) | | NO: 11) | | | NO: 80) | |
| 5 | pWISE3900 | Tobacco | PWsp366 | XhoI, | Cas12a::VirD2 | pWISE3452 | Test |
| | (SEQ ID | PDS | (SEQ ID | SacI | (SEQ ID NO: 66) | (SEQ ID | Vector |
| | NO: 140) | | NO: 12) | | | NO: 80) | |
| 6 | pWISE3901 | Yeast | PWsp1409 | EcoRV | Cas12a::VirD2 | pWISE3452 | Test |
| | (SEQ ID | URA3 | (SEQ ID | | (SEQ ID NO: 66) | (SEQ ID | Vector |
| | NO: 145) | | NO: 59) | | | NO: 80) | |
| 7 | pWISE3902 | Yeast | PWsp1410 | NcoI | Cas12a::VirD2 | pWISE3452 | Test |
| | (SEQ ID | URA3 | (SEQ ID | | (SEQ ID NO: 66) | (SEQ ID | Vector |
| | NO: 146) | | NO: 60) | | | NO: 80) | |
| 8 | pWISE3111 | N/A | N/A | N/A | VirD2::Cas12a::VirF | N/A | Negative |
| | (SEQ ID | | | | (SEQ ID NO: 70) | | Control |
| | NO: 125) | | | | | | |
| 9 | pWISE3905 | Yeast | PWsp1409 | EcoRV | VirD2::Cas12a::VirF | pWISE3111 | Test |
| | (SEQ ID | URA3 | (SEQ ID | | (SEQ ID NO: 70) | (SEQ ID | Vector |
| | NO: 147) | | NO: 59) | | | NO: 125) | |
| 10 | pWISE3906 | Yeast | PWsp1410 | NcoI | VirD2::Cas12a::VirF | pWISE3111 | Test |
| | (SEQ ID | URA3 | (SEQ ID | | (SEQ ID NO: 70) | (SEQ ID | Vector |
| | NO: 148) | | NO: 60) | | | NO: 125) | |
| 11 | pWISE3910 | Yeast | PWsp1409 | EcoRV | VirD2::Cas12a::VirF | pWISE3111 | Test |
| | (SEQ ID | URA3 | (SEQ ID | | (SEQ ID NO: 70) | (SEQ ID | Vector |
| | NO: 150) | | NO: 59) | | | NO: 125) | |
| 12 | pWISE3911 | Yeast | PWsp1410 | NcoI | VirD2::Cas12a::VirF | pWISE3111 | Test |
| | (SEQ ID | URA3 | (SEQ ID | | (SEQ ID NO: 70) | (SEQ ID | Vector |
| | NO: 151) | | NO: 60) | | | NO: 125) | |
| 13 | pWISE711 | ZsGreen | ZsGreen | N/A | N/A | N/A | Transformation |
| | (SEQ ID | Control | Control | | | | Control |
| | NO: 124) | | | | | | |

### Tobacco Leaf Infiltration Assay for Detecting Editing Via CRISPR/Cas Components Delivered as RNPs Via the Type IV Secretion System

[0318] Agrobacterium tumefaciens AB53ΔVirD2 was streaked out onto LB agar plates with gentamicin and grown at 28TC for 48 hours. On the day of transformation, approximately half a loop's worth of agrobacterium was re-suspended in 1-mL of ultrapure water. The cells were then centrifuged and the supernatant discarded. The cells were washed an additional 2× with 1-mL of ultrapure water, re-suspended and aliquoted into 50 μL aliquots. The aliquots were chilled on ice and transformed with plasmid DNA immediately. Approximately 1 μg of DNA from each plasmid shown below in Table 3 was transformed into 50 μL of A. tumefaciens ΔVirD2 by electroporation. Transformations were plated onto LB agar plates containing kanamycin and gentamicin, and were grown at 28° C. for 48 hours.

TABLE 3
Plasmids Used in Rapid Tobacco Assays

| Plasmid | Spacer | Nuclease | Description |
|---|---|---|---|
| pWISE3111 | N/A | VirD2::Cas12a::VirF | Positive |
| (SEQ ID | | (SEQ ID NO: 70) | Control for |
| NO: 125) + | | | Transformation |
| pWISE711 | | | |
| (SEQ ID | | | |
| NO: 74) | | | |
| pWISE3111 | N/A | VirD2::Cas12a::VirF | Negative |
| (SEQ ID | | (SEQ ID NO: 70) | Control |
| NO: 125) | | | |
| pWISE3452 | N/A | Cas12a::VirD2 (SEQ ID | Negative |
| (SEQ ID | | NO: 66) | Control |
| NO: 80) | | | |
| pWISE3899 | Tobacco | Cas12a::VirD2 (SEQ ID | Test Case |
| (SEQ ID | PDS | NO: 66) | |
| NO: 139) | (PWsp365 | | |
| | SEQ ID | | |
| | NO: 61) | | |
| pWISE3900 | Tobacco | Cas12a::VirD2 (SEQ ID | Test Case |
| (SEQ ID | PDS | NO: 66) | |
| NO: 140) | (PWsp366 | | |
| | SEQ ID | | |
| | NO: 62) | | |

[0319] Leaves of 12 week old Nicotiana benthamiana plants were infiltrated with the Agrobacterium cultures harboring the appropriate vectors (3 leaves per construct) shown above in Table 3. The cultures were used at an OD₆₀₀ₙₘ of 0.7 in infiltration buffer: 10 mM MES, 10 mM MgCl₂, 100 uM acetosyringone, pH 5.6). Once leaf infiltration was complete, the plants were grown in a growth chamber (22° C., 50% humidity with 8 hours light/16 hours dark) for 6 days. 2×50 mg of leaf tissue was then sampled from each plant using a hole punch, and genomic DNA was extracted using a DNeasy 96 plant kit (Qiagen) according to manufacturer's instructions. Samples were then analyzed by deep amplicon sequencing on an Illumina MiSeq to detect INDELS (insertions and deletions) at the PDS target site.

[0320] The spacers used in the tobacco experiments target the PDS locus. The predicted cut site for PWsp366 (SEQ ID NO:62) may result in the disruption of XhoI and SacI restriction sites, allowing for detection of editing by PCR amplification, restriction enzyme digestion and sanger sequencing. Therefore, in addition to the deep amplicon sequencing, the genomic DNA extracted from the tobacco leaf infiltrations with construct pWISE3900 (SEQ ID NO:140) and pWISE3452 (SEQ ID NO:80) were subjected to PCR amplification of a 1,000 bp fragment of the PDS locus with primers PM10269 (SEQ ID NO:152) and PM10270 (SEQ ID NO:153) and digestion with no enzyme, XhoI, or SacI to detect samples that had the restriction sites disrupted.

### Rapid Tobacco Assay (AGROBEST) for Detecting Editing Via CRISPR/Cas Components Delivered as RNPs Via the Type IV Secretion System

[0321] In addition to the tobacco leaf infiltration experiments, a modified version of the AGROBEST (Wu, Hung-Yi, et al. Plant methods 10.1 (2014): 19) system was also used. Tobacco seeds were first sterilized with 50% bleach and rinsed 5× with sterile water. 2 mL of ½ MS liquid medium (½ MS salt supplemented with 0.5% sucrose (w/v), pH 5.5 (adjusted to 5.7 by KOH but pH 5.5 after autoclaving) was added to each well of 6-well plates. In each well, approximately 6 N. benthamiana seeds were added. The lid was put onto the plate, and airpore tape was used to seal the edges of the plate. Seeds were then allowed to germinate at 22° C. with 16-hr light and 8-hr dark cycle in a percival for 4 days.

[0322] Two days before co-cultivation, Agrobacterium tumefaciens AB53ΔVirD2 containing the constructs shown in Table 3 were inoculated in 5-mL LB liquid medium containing kanamycin and gentamicin and grown overnight at 28° C. with 200 rpm shaking. The day prior to co-cultivation, the overnight Agrobacterium cultures were spun down at 5,000 rpm for 10 minutes in a bench-top centrifuge. The supernatant was discarded, and the cultures were re-suspended in induction medium (AB-MES with 200 μM acetosyringone, no antibiotics) to a final OD₆₀₀ of 0.2. Cultures were then returned to the incubator overnight at 28° C. with 200 rpm shaking.

[0323] The following day, the Agrobacterium expression cultures were pelleted at 5,000 rpm for 10 minutes. The pellets were then re-suspended in co-cultivation liquid media (¼ MS, ½ AB-MES, acetosyringone 200 μM) to a final OD₆₀₀ of 0.12.

[0324] The growth medium of the tobacco seedlings was then replaced with the co-cultivation liquid media, and incubated for 48 hours in the percival in the same conditions as above. After the 48-hour co-cultivation, the tobacco seedlings were transferred into water to wash off any Agrobacterium on the surface of the plants. They were then transferred to new 6-well plates containing 2-mL of ½ MS+200 mg/L of Timentin. The seedlings were then returned to the percival and grown for 24 hours. The following day, all seedlings from each well were rinsed off with water and put into a 96-well block with 2 steel ball bearings for genomic DNA extraction. The samples were frozen at −80C prior to DNA extraction. Genomic DNA was then extracted using a DNeasy 96 plant kit (Qiagen) according to manufacturer's instructions. Samples were then analyzed by deep amplicon sequencing on an Illumina MiSeq to detect INDELS (insertions and deletions) at the PDS target site.

[0325] The spacers used in the tobacco experiments target the PDS locus. The predicted cut site for PWsp366 (SEQ ID NO:62) may result in the disruption of XhoI and SacI restriction sites, allowing for detection of editing by PCR amplification, restriction enzyme digestion and sanger sequencing. Therefore, in addition to the deep amplicon sequencing, the genomic DNA extracted from the tobacco leaf infiltrations with construct pWISE3900 (SEQ ID NO:140) and pWISE3452 (SEQ ID NO:80) were subjected to PCR amplification of a 1,000 bp fragment of the PDS locus with primers PM10269 (SEQ ID NO:152) and PM10270 (SEQ ID NO:153) and digestion with no enzyme, XhoI, or SacI to detect samples that had the restriction sites disrupted.

### Yeast Assay for Detecting Editing Via CRISPR/Cas Components Delivered as RNPs Via the Type IV Secretion System

[0326] Agrobacterium tumefaciens AB53ΔVirD2 was streaked out onto LB agar plates with gentamicin and grown at 28° C. for 48 hours. On the day of transformation, approximately half a loop's worth of agrobacterium was re-suspended in 1-mL of ultrapure water. The cells were then centrifuged and the supernatant discarded. The cells were washed an additional 2× with 1-mL of ultrapure water, re-suspended and aliquoted into 50 μL aliquots. The aliquots were chilled on ice and transformed with plasmid DNA immediately. Approximately 1 μg of DNA from each plasmid shown in Table 4 was transformed into 50 μL of A. tumefaciens ΔVirD2 by electroporation. Transformations were plated onto LB agar plates containing kanamycin and gentamicin, and were grown at 28° C. for 48 hours.

TABLE 4
Plasmids Used in Yeast Assay

| Plasmid | Spacer | Nuclease | Description |
|---|---|---|---|
| pWISE3111 | N/A | VirD2::Cas12a::VirF | Positive |
| (SEQ ID | | (SEQ ID NO: 70) | Control for |
| NO: 125) + | | | Transformation |
| pWISE711 | | | |
| (SEQ ID | | | |
| NO: 124) | | | |
| pWISE3111 | N/A | VirD2::Cas12a::VirF | Negative |
| (SEQ ID | | (SEQ ID NO: 70) | Control |
| NO: 125) | | | |
| pWISE3452 | N/A | Cas12a::VirD2 (SEQ ID | Negative |
| (SEQ ID | | NO: 66) | Control |
| NO: 80) | | | |
| pWISE3897 | Yeast URA3 | Cas12a::VirD2 (SEQ ID | Test Case |
| (SEQ ID | (PWsp1409 | NO: 66) | |
| NO: 143) | SEQ ID | | |
| | NO: 59) | | |
| pWISE3898 | Yeast URA3 | Cas12a::VirD2 (SEQ ID | Test Case |
| (SEQ ID | (PWsp1410 | NO: 66) | |
| NO: 144) | SEQ ID | | |
| | NO: 60) | | |
| pWISE3901 | Yeast URA3 | Cas12a::VirD2 (SEQ ID | Test Case |
| (SEQ ID | (PWsp1409 | NO: 66) | |
| NO: 145) | SEQ ID | | |
| | NO: 59) | | |
| pWISE3902 | Yeast URA3 | Cas12a::VirD2 (SEQ ID | Test Case |
| (SEQ ID | (PWsp1410 | NO: 66) | |
| NO: 146) | SEQ ID | | |
| | NO: 60) | | |
| pWISE3905 | Yeast URA3 | VirD2::Cas12a::VirF | Test Case |
| (SEQ ID | (PWsp1409 | (SEQ ID NO: 70) | |
| NO: 147) | SEQ ID | | |
| | NO: 59) | | |
| pWISE3906 | Yeast URA3 | VirD2::Cas12a::VirF | Test Case |
| (SEQ ID | (PWsp1410 | (SEQ ID NO: 70) | |
| NO: 148) | SEQ ID | | |
| | NO: 60) | | |
| pWISE3910 | Yeast URA3 | VirD2::Cas12a::VirF | Test Case |
| (SEQ ID | (PWsp1409 | (SEQ ID NO: 70) | |
| NO: 150) | SEQ ID | | |
| | NO: 59) | | |
| pWISE3911 | Yeast URA3 | VirD2::Cas12a::VirF | Test Case |
| (SEQ ID | (PWsp1410 | (SEQ ID NO: 70) | |
| NO: 151) | SEQ ID | | |
| | NO: 60) | | |

[0327] Three to four colonies from each Agrobacterium transformation plate were picked and inoculated into 5-mL LB liquid culture with kanamycin and gentamicin, and a colony of S. cerevisiae α1 was also inoculated into 10-mL of YPD liquid media in a 50-mL plastic bioreactor. Cultures were grown overnight at 28° C. with shaking at 200 rpm. The following day, the Agrobacterium cultures were spun down at 5,000 rpm for 10 minutes in a table-top centrifuge. The supernatant was discarded, and the cultures were re-suspended in 5-mL of induction medium (IM: ½ MS salts and 40 mM MES, pH 5.3, 10 mM glucose, 0.5% (w/v) glycerol and 200 mM acetosyringone (AS)) to a final OD₆₀₀ of 0.25. Cultures were then incubated for an additional 5 hours at 28° C. with 200 rpm shaking. The overnight yeast culture was pelleted, and re-suspended in 1-mL of IM liquid media. Yeast and Agrobacterium cultures were then mixed 1:1 in a 96-well plate and incubated at 28° C. with no shaking. At 84+/−12 hours of incubation, the yeast and Agrobacterium cultures were plated on YPD (yeast extract, peptone, dextrose) agar plates with 0.2% 5-FOA, 500 mg/L carbenicillin and 200 mg/L cefotaxime. After two days of selection areas of stronger growth were examined with PCR. At 108+/−12 hours of incubation, the yeast and Agrobacterium cultures were plated on SD (synthetic dropout) agar plates with 0.1% 5-FOA, 50 mg/L uracil, 500 mg/L carbenicillin and 200 mg/L cefotaxime. After two days of selection colonies were examined with PCR.

[0328] Spacers PWspl409 (SEQ ID NO:59) and PWsp1410 (SEQ ID NO:60) target the yeast URA3 locus. The predicted cut site with LbCas12a for each spacer may result in the disruption of a NcoI or EcoRV restriction site, and therefore may be screened by PCR amplification, digestion with NcoI or EcoRV, and Sanger sequencing. Yeast colonies on plates containing 5-FOA were picked and colony PCR was performed on them to amplify a 1,000 bp fragment of the URA3 locus with primers PM10271 (SEQ ID NO:154) and PM10272 (SEQ ID NO:155). PCR products were digested with no enzyme, NcoI or EcoRV and run on an agarose gel. All samples that showed no digestion (full-length fragment, suggesting the restriction site was disrupted) were purified and sent for sanger sequencing.

### Example 3: Targeted Integration Through T-DNA Recruitment Using VirD2 Recruited by Cas12a

[0329] Agrobacterium tumefaciens deficient in VirD2 carrying the plasmids listed in Table 5 were each transformed into 4500 soy explants. Negative control constructs were transformed from a isogenic Agrobacterium tumefaciens which retained a functional VirD2 gene.

TABLE 5
Plasmids in Agrobacterium tumefaciens transformed
into soy explants and a summary of shoots produced.

| Integration | | Plasmid 1 | | | |
|---|---|---|---|---|---|
| Target | Plasmid 1 | Editor | Plasmid 2 | Plasmid 2 Editor | Green Shoots |
| Soy Target A | pWISE3592 | VirD2::SH3dom | pWISE3788 | 4xSH3lig::Cas12a | 971 |
| | (SEQ ID | (SEQ ID | (SEQ ID | (SEQ ID NO: 187) | |
| | NO: 81) | NO: 186) | NO: 110) | | |
| Ef1 alpha | pWISE3776 | Cas12a (SEQ | | | 96 |
| (integration | (SEQ ID | ID NO: 171) | | | |
| negative | NO: 83) | | | | |
| control) | | | | | |
| Polyubiquitin | pWISE3777 | Cast2a (SEQ | | | 102 |
| (integration | (SEQ ID | ID NO: 171) | | | |
| negative | NO: 84) | | | | |
| control) | | | | | |
| Ef1 alpha | pWISE3592 | VirD2::SH3dom | pWISE3587 | 4xSH3lig::Cas12a | 307 |
| | (SEQ ID | (SEQ ID | (SEQ ID | (SEQ ID NO: 187) | |
| | NO: 81) | NO: 186) | NO: 106) | | |
| Ef1 alpha | pWISE3592 | VirD2::SH3dom | pWISE3588 | 4xSH3lig::Cas12a | 293 |
| | (SEQ ID | (SEQ ID | (SEQ ID | (SEQ ID NO: 187) | |
| | NO: 81) | NO: 186) | NO: 107) | | |
| Polyubiquitin | pWISE3592 | VirD2::SH3dom | pWISE3767 | 4xSH3lig::Cas12a | 198 |
| | (SEQ ID | (SEQ ID | (SEQ ID | (SEQ ID NO: 187) | |
| | NO: 81) | NO: 186) | NO: 108) | | |
| Polyubiquitin | pWISE3592 | VirD2::SH3dom | pWISE3768 | 4xSH3lig::Cas12a | 202 |
| | (SEQ ID | (SEQ ID | (SEQ ID | (SEQ ID NO: 187) | |
| | NO: 81) | NO: 186) | NO: 109) | | |
| Polyubiquitin | pWISE3108 | VirD2::SH3dom | pWISE3771 | 4xSH3lig::Cas12a | 46 |
| | (SEQ ID | (SEQ ID | (SEQ ID | (SEQ ID NO: 187) | |
| | NO: 82) | NO: 186) | NO: 111) | | |

[0330] In these experiments, VirD2 N-terminus was fused to a nuclear localization signal (NLS) followed by an SH3 domain and the C-terminus of VirD2 and expressed in Agrobacterium from SEQ ID NO:81. This VirD2 arrangement was shown to successfully lead to T-DNA transfer in Example 1. Alternatively, the SH3 domain was fused to the N-terminus of VirD2 and preceded by an NLS as in SEQ ID NO:82. The second plasmid present in the Agrobacterium encodes a T-DNA containing a targeted integration repair template (SEQ ID NO:100-111) and an expressed region encoding a 4×SH3 ligand fused to LbCas12a without an NLS. In such an arrangement, VirD2 must bind to LbCas12a through the SH3-SH3 ligand interaction and bring both the T-DNA and LbCas12a into the nucleus. Once inside the nucleus, LbCas12a then recruits the VirD2-T-DNA complex to the target recombination site.

[0331] In the case of the Soy Target A target, the repair template modified the endogenous MscI/HaeIII restriction site to replace it with an XbaI restriction site and also to prevent re-cutting by the Cas12a-guide complex. In the case of the polyubiquitin and EF1αtarget sites the repair templates includes a 1) 1kb left homology arm followed by 2) an in-frame fusion of P2A “self-cleaving” peptide followed by 3) an in-frame chloroplast transit peptide followed by 4) and in-frame aadA spectinomycin resistance gene followed by 5) a modified target sequence to prevent re-cutting by the Cas12a-guide complex after successful integration followed by 6) a 1kb right homology arm.

[0332] The explants were selected on spectinomycin for expression of the aadA gene. In the experiment targeting the Soy Target A gene, aadA was expressed from a typical selectable marker cassette. In the experiments targeting EF1 alpha or polyubiquitin the aadA gene was expressed due to the in-frame fusion with the native target genes after a successful targeted integration event. Green shoots were non-destructively sampled for genomic DNA (gDNA) extraction.

[0333] Editing tools targeting the polyubiquitin and EF1αsites produced more green shoots than the negative control plasmids containing the repair templates without the presence of the VirD2-Cas12a complex. These increases were roughly 2× and 3×, respectively, and suggested a significant number of successful aadA targeted insertion events. The polyubiquitin target loci were screened for aadA insertion with PCR using a primer targeting the flanking region of the polyubiquitin gene 5′ of the left homology arm (SEQ ID NO:113) and a primer specific to the aadA insert (SEQ ID NO:114); the product of said PCR expected to be 1,195 bp.

[0334] For some samples from the pWISE3592+pWISE3767 (SEQ ID NO:81 and 93) transformation (corresponding to Box 1 wells A2, A6, A7, B2, C3, D3, F3 and F9), additional samples were taken for RNA extraction. RNA was extracted using Qiagen RNeasy Plant mini kits. The total RNA was then treated with DNase I to remove any contaminating gDNA. Reverse transcription was performed with an aadA specific primer (SEQ ID NO:138) using Thermo Fisher SuperScript IV. PCR was then performed as in the gDNA screening reactions with a primer targeting the flanking region of the polyubiquitin gene 5′ of the left homology arm (SEQ ID NO:113) and a primer specific to the aadA insert (SEQ ID NO:114); the product of said PCR expected to be 1,195 bp. FIG. 4 is an image of RT-PCR products from samples corresponding to Box 1 wells A2, A6, A7, B2, C3, D3, F3 and F9 run on a 1% agarose gel with GeneRuler 1 kb Plus DNA Ladder in wells 1 and 10. Samples A2, D3 and F3 produced the expected sized bands.

[0335] Bands of the expected size were gel extracted and sequence confirmed to match an expected HDR repair (targeted integration) by Sanger sequencing. Sequence from A2 (SEQ ID NO:198), D3 (SEQ ID NO:199) and F3 (SEQ ID NO:200) confirmed that the polyubiquitin transcript pool contained sequence transcribed from a perfect HDR integration of aadA at the 3′ end of the coding region of polyubiquitin. FIG. 5 shows (top) the polyubiquitin gene target with the transcribed region in the white arrow and the crRNA target site marked by a black lightning bolt; intergenic regions are in downward hatch marks (upstream of the transcript region) and upward hatch marks (downstream of the transcript region). Second from top is the repair template region included on the delivered T-DNA. Regions outlined in bold are left and right homology arms. The black box is the LP4-P2A self-cleaving peptide region, the dark gray box is the CTP-aadA encoding region, and the light gray box is an altered region meant to prevent repeated cutting by the Cas12a-crRNA complex after a repair. Third from top is a diagram of a perfect targeted gene insertion. The black lines below indicate Sanger sequenced RT-PCR products mapped to their regions of overlap on the targeted insertion, from samples A2, D3 and F3.

[0336] For some samples from the pWISE3592+pWISE3767 (SEQ ID NO:81 and 93) transformation, indicated as potential HDR positives, additional tissue could not be harvested at the time of the experiment for RNA extraction. For those samples, gDNA samples were amplified with primers for the native polyubiquitin locus flanking (outside) the region of homology contained within the HDR template (SEQ ID NO:149 and 142). The predominant product from these reactions was the wild type amplicon (2,324 bp). A semi-nested PCR from gel extracted DNA at the insertion product size (3,428 bp) using primers designed to specifically amplify the left flank to aadA junction (SEQ ID NO:113 and 114) produced the expected 1,242 bp product and/or a nested PCR using primers designed to specifically amplify the aadA junction to the right flank (SEQ ID NO:201 and 202) produced an expected band of 1,366 bp. This indicates that HDR was successful. Samples from Box 1 wells A2, A7, B2, B4, C2, E6, G7, G8 produced these DNA products which were gel isolated and Sanger sequenced confirming the perfect HDR integration of aadA at the 3′ end of the coding region of polyubiquitin. In the diagram provided in FIG. 5, gray lines below the gene insertion diagram indicate Sanger sequenced PCR products mapped to their regions of overlap on the targeted insertion, from samples A2 (SEQ ID NO:203 and 204), A7 (SEQ ID NO:205), B2 (SEQ ID NO:206 and 207), B4 (SEQ ID NO:208), C2 (SEQ ID NO:209 and 210), E6 (SEQ ID NO:211), G7(SEQ ID NO:212) and G8 (SEQ ID NO:213).

### Example 4: Targeted Integration Through T-DNA Recruitment by VirD2-Cas12a Fusion Proteins

[0337] Agrobacterium tumefaciens deficient in VirD2 carrying the plasmids listed in Table 6 were each transformed into 4500 soy explants. Negative control constructs were transformed from an isogenic Agrobacterium tumefaciens which retained a functional VirD2 gene.

TABLE 6
Plasmids in Agrobacterium tumefaciens transformed
into soy explants and a summary of shoots produced.

| Integration Target | Editor | Plasmid 1 | Plasmid 2 | Green Shoots |
|---|---|---|---|---|
| Soy Target A | Cas12a::VirD2 (SEQ | pWISE3104 | pWISE3387 | 734 |
| | ID NO: 66) | | | |
| Soy Target A | Cas12a::VirD2 (SEQ | pWISE3104 | pWISE3388 | 759 |
| | ID NO: 66) | | | |
| Ef1 alpha (aadA | Cas12a (SEQ ID | pWISE3776 | | 96 |
| integration negative | NO: 171) | | | |
| control) | | | | |
| Polyubiquitin (aadA | Cas12a (SEQ ID | pWISE3777 | | 102 |
| integration negative | NO: 171) | | | |
| control) | | | | |
| Ef1 alpha | Cas12a::VirD2 (SEQ | pWISE3452 | pWISE3352 | 101 |
| | ID NO: 66) | | | |
| Ef1 alpha | Cas12a::VirD2 (SEQ | pWISE3452 | pWISE3358 | 55 |
| | ID NO: 66) | | | |
| Polyubiquitin | Cas12a::VirD2 (SEQ | pWISE3452 | pWISE3361 | 219 |
| | ID NO: 66) | | | |
| Polyubiquitin | Cas12a::VirD2 (SEQ | pWISE3452 | pWISE3362 | 171 |
| | ID NO: 66) | | | |

In the case of the Soy Target A target, the repair template modified the endogenous MscI/HaeIII restriction site to replace it with an XbaI restriction site and also to prevent re-cutting by the Cas12a-guide complex. In the case of the polyubiquitin and EF1αtarget sites the repair templates includes a 1) 1kb left homology arm followed by 2) an in-frame fusion of P2A “self-cleaving” peptide followed by 3) an in-frame chloroplast transit peptide followed by 4) and in-frame aadA spectinomycin resistance gene followed by 5) a modified target sequence to prevent re-cutting by the Cas12a-guide complex after successful integration followed by 6) a 1kb right homology arm.

[0338] The explants were selected on spectinomycin for expression of the aadA gene. In the experiment targeting the Soy Target A gene, aadA was expressed from a typical selectable marker cassette. In the experiments targeting EF1 alpha or polyubiquitin the aadA gene was expressed due to the in-frame fusion with the native target genes after a successful targeted integration event. Green shoots were non-destructively sampled for genomic DNA (gDNA) extraction.

[0339] The polyubiquitin site produced more green shoots than the negative control plasmid containing the repair template without the presence of the VirD2-Cas12a complex. This increase was roughly 2× and suggested a significant number of successful aadA targeted integration events. Because of this enrichment, the focus was on screening the polyubiquitin target locus for aadA insertion with PCR using a primer targeting the flanking region of the polyubiquitin gene 5′ of the left homology arm (SEQ ID NO: 113) and a primer specific to the aadA insert (SEQ ID NO:114); the product of said PCR expected to be 1,195 bp.

[0340] For some samples from the pWISE3452+pWISE3362 (SEQ ID NO:80 and 90) transformation (corresponding to Box 1 wells B3, F9 and G7), additional samples were taken for RNA extraction. RNA was extracted using Qiagen RNeasy Plant mini kits. The total RNA was then treated with DNase I to remove any contaminating gDNA. Reverse transcription was performed with an aadA specific primer (SEQ ID NO:138) using Thermo Fisher SuperScript IV. PCR was then performed as in the gDNA screening reactions with a primer targeting the flanking region of the polyubiquitin gene 5′ of the left homology arm (SEQ ID NO:113) and a primer specific to the aadA insert (SEQ ID NO:114); the product of said PCR expected to be 1,242 bp. FIG. 6 is an image of RT-PCR products from samples corresponding to Box 1 wells B3 (lane 1), G7 (lane 4) and F9 (lane 7) run on a 1% agarose gel with GeneRuler 1 kb Plus DNA Ladder in lane 9. Sample F9 produced slightly smaller than the expected sized band, which was extracted and Sanger sequenced.

[0341] For some samples from the pWISE3452+pWISE3361 (SEQ ID NO:80 and 89) transformation and from the rom the pWISE3452+pWISE3362 (SEQ ID NO:80 and 90) transformation, indicated as potential HDR positives, additional tissue could not be harvested at the time of the experiment for RNA extraction. For those samples, gDNA samples were amplified with primers for the native polyubiquitin locus flanking (outside) the region of homology contained within the HDR template (SEQ ID NO:149 and 142). The predominant product from these reactions was the wild type amplicon (2,324 bp). A semi-nested PCR from gel extracted DNA at the insertion product size (3,428 bp) using primers designed to specifically amplify the left flank to aadA junction (SEQ ID NO:113 and 114) produced bands smaller than the expected 1,195 bp product (FIG. 7). Samples from pWISE3452+pWISE3361 (SEQ ID NO:80 and 89) wells B6, E9, F9 and pWISE3452+pWISE3362 (SEQ ID NO:80 and 90) wells B3, G2, and G7 produced these DNA products which were gel isolated and Sanger sequenced confirming the perfect HDR integration of aadA at the 3′ end of the coding region of polyubiquitin. The FIG. 8 diagram gray lines below the gene insertion diagram indicate Sanger sequenced PCR products mapped to their regions of overlap on the targeted insertion, from samples B3 (SEQ ID NO:215), B6 (SEQ ID NO:216), E9 (SEQ ID NO:217), F9 (SEQ ID NO:218), G2 (SEQ ID NO:219), and G7 (SEQ ID NO:220). These results indicate that targeted integration was successful.

[0342] FIG. 8 shows (top) the polyubiquitin gene target with the transcribed region in the white arrow and the crRNA target site marked by a black lightning bolt; intergenic regions are in downward hatch marks (upstream of the transcript region) and upward hatch marks (downstream of the transcript region). Second from top is the repair template region included on the delivered T-DNA. Regions outlined in bold are left and right homology arms. The black box is the LP4-P2A self-cleaving peptide region, the dark gray box is the CTP-aadA encoding region, and the light gray box is an altered region meant to prevent repeated cutting by the Cas12a-crRNA complex after a repair. Third from top is a diagram of a detected targeted gene insertion with a 228 bp deletion within the region covered by the left homology arm. The black lines below indicate Sanger sequenced RT-PCR product mapped to its region of overlap on the targeted insertion, from samples G7 (SEQ ID NO:214).

[0343] Further, this example of targeted integration demonstrates the capacity of the VirD2::Cas12a fusion protein to cut a genomic locus following secretion through the type-IV secretion system of Agrobacterium.

### Example 5: T-DNA Delivery by VirD2 Fusion Proteins with Cas12a

[0344] The virD2 coding sequence from Agrobacterium tumefaciens C58 Ti-plasmid was fused to optimized coding sequences for gene expression in Agrobacterium tumefaciens. Three protein conformations were produced as described in Table 7. A VirD2 deficient A. tumefaciens strain was transformed with plasmid encoded vird2 expression cassettes and T-DNA encoding a plant optimized zsgreen.

TABLE 7
Treatments and plasmids used in VirD2-
Cas12a fusion protein experiments

| Treatment | Delivered Plasmids |
|---|---|
| Cas12a::VirD2 | pWISE3104 (SEQ ID NO: 79) + |
| (SEQ ID NO: 66) | pWISE2737 (SEQ ID NO: 127) |
| VirD2::Cas12a::VirF | pWISE3111 (SEQ ID NO: 125) + |
| (SEQ ID NO: 70) | pWISE2737 (SEQ ID NO: 127) |
| VirD2::Cas12a | pWISE3118 (SEQ ID NO: 126) + |
| (SEQ ID NO: 197) | pWISE2737 (SEQ ID NO: 127) |
| Complementation control | pWISE3030 (SEQ ID NO: 119) + |
| | pWISE711 (SEQ ID NO: 124) |

[0345] Leaves of four-week-old Nicotiana benthamiana plants were infiltrated with A. tumefaciens overnight cultures (OD₆₀₀ₙₘ of 0.7 in infiltration buffer: 10 mM MES, 10 mM MgCl₂, 100 uM acetosyringone, pH 5.6). Validation of VirD2 functionality by delivery of a zsgreen encoding T-DNA into the plant cells was done via fluorescent microscopy 10-11 days post infiltration (dpi). FIG. 9 shows an example for successful T-DNA encoded zsgreen delivery by modified VirD2 into the plant cell nucleus. Fluorescent microscopy pictures were taken 10-11 days after infiltration.

[0346] The foregoing is illustrative of the present invention, and is not to be construed as limiting thereof. The invention is defined by the following claims, with equivalents of the claims to be included therein.

What is claimed is:

1. A fusion protein comprising an Agrobacterium effector protein and a recruiting motif.

2. The fusion protein of claim 1, wherein the Agrobacterium effector protein is an Agrobacterium virulence protein.

3. The fusion protein of claim 1, wherein the Agrobacterium effector protein is VirD2, VirE2, VirF, VirE3, VirD5, and/or GALLS.

4. The fusion protein of claim 1, wherein the Agrobacterium effector protein comprises a T4SS secretion signal.

5. The fusion protein of claim 1, wherein the recruiting motif comprises an affinity polypeptide.

6. The fusion protein of claim 1, wherein the recruiting motif comprises a peptide tag.

7. A composition, system, kit, or complex comprising a fusion protein of claim 1.

8. A fusion protein comprising an Agrobacterium effector protein and a nucleic acid binding polypeptide.

9. The fusion protein of claim 8, wherein the Agrobacterium effector protein is an Agrobacterium virulence protein.

10. The fusion protein of claim 8, wherein the Agrobacterium effector protein is VirD2, VirE2, VirF, VirE3, or VirD5.

11. The fusion protein of claim 8, wherein the Agrobacterium effector protein comprises a T4SS secretion signal.

12. The fusion protein of claim 8, wherein the nucleic acid binding polypeptide is a CRISPR-Cas effector protein.

13. The fusion protein of claim 8, wherein the nucleic acid binding polypeptide is from a Type II CRISPR-Cas system or a Type V CRISPR-Cas system.

14. A composition, system, kit, or complex comprising a fusion protein of claim 8.

15. A fusion protein comprising a nucleic acid binding polypeptide and a recruiting motif.

16. The fusion protein of claim 15, wherein the nucleic acid binding polypeptide is a CRISPR-Cas effector protein.

17. The fusion protein of claim 15, wherein the nucleic acid binding polypeptide is from a Type II CRISPR-Cas system or a Type V CRISPR-Cas system.

18. The fusion protein of claim 15, wherein the recruiting motif comprises an affinity polypeptide.

19. The fusion protein of claim 15, wherein the recruiting motif comprises a peptide tag.

20. A composition, system, kit, or complex comprising a fusion protein of claim 15.

The application's sequence listing, which the Patent Office published only in electronic form, follows.

SEQUENCE LISTING (224 sequences)

SEQ ID NO: 1 - DNA, 1592 bp, Medicago truncatula
  source 1..1592: mol_type = genomic DNA
actgttaataatttttaaacgtcagcgcactaaaaaaacgaaaagacggacacgtgaaaataaaaaacacacactagtttatgacgcaatactattttacttatgatttgggtacattagacaaaaccgtgaaagagatgtatcagctatgaaacctgtatacttcaatacagagacttactcatatcggatacgtacgcacgaagtatcatattaattattttaatttttaataaatattttatcggatacttatgtgatactctacatatacacaaggatatttctaagatactttatagatacgtatcctagaaaaacatgaagagtaaaaaagtgagacaatgttgtaaaaattcattataaatgtatatgattcaattttagatatgcatcagtataattgattctcgatgaaacacttaaaattatatttcttgtggaagaacgtagcgagagaggtgattcagttagacaacattaaataaaattaatgttaagttcttttaatgatgtttctctcaatatcacatcatatgaaaatgtaatatgatttataagaaaatttttaaaaaatttattttaataatcacatgtactattttttaaaaattgtatcttttataataatacaataataaagagtaatcagtgttaatttttcttcaaatataagttttattataaatcattgttaacgtatcataagtcattaccgtatcgtatcttaatttttttttaaaaaccgctaattcacgtacccgtattgtattgtacccgcacctgtatcacaatcgatcttagttagaagaattgtctcgaggcggtgcaagacagcatataatagacgtggactctcttataccaaacgttgtcgtatcacaaagggttaggtaacaagtcacagtttgtccacgtgtcacgttttaattggaagaggtgccgttggcgtaatataacagccaatcgatttttgctataaaagcaaatcaggtaaactaaacttcttcattcttttcttccccatcgctacaaaaccggttcctttggaaaagagattcattcaaacctagcacccaattccgtttcaaggtataatctactttctattcttcgattattttattattattagctactatcgtttaatcgatcttttcttttgatccgtcaaatttaaattcaattagggttttgttcttttctttcatctgattgaaatccttctgaattgaaccgtttacttgattttactgtttattgtatgatttaatcctttgtttttcaaagacagtctttagattgtgattaggggttcatataaatttttagatttggatttttgtattgtatgattcaaaaaatacgtcctttaattagattagtacatggatattttttacccgatttattgattgtcagggagaatttgatgagcaagtttttttgatgtctgttgtaaattgaattgattataattgctgatctgctgcttccagttttcataacccatattcttttaaccttgttgtacacacaatgaaaaattggtgattgattcatttgtttttctttgttttggattatacagg

SEQ ID NO: 2 - DNA, 2000 bp, Zea mays
  source 1..2000: mol_type = genomic DNA
gtcgtgcccctctctagagataaagagcattgcatgtctaaagtataaaaaattaccacatatttttttgtcacacttatttgaagtgtagtttatctatctctatacatatatttaaacttcactctacaaataatatagtctataatactaaaataatattagtgttttagaggatcatataaataaactgctagacatggtctaaaggataattgaatattttgacaatctacagttttatctttttagtgtgcatgtgatctctctgttttttttgcaaatagcttgacctatataatacttcatccattttattagtacatccatttaggatttagggttgatggtttctatagactaatttttagtacatccattttattctttttagtctctaaattttttaaaactaaaactctattttagttttttatttaataatttagatataaaatgaaataaaataaattgactacaaataaaacaaataccctttaagaaataaaaaaactaagcaaacatttttcttgtttcgagtagataatgacaggctgttcaacgccgtcgacgagtctaacggacaccaaccagcgaaccagcagcgtcgcgtcgggccaagcgaagcagacggcacggcatctctgtagctgcctctggacccctctcgagagttccgctccaccgttggacttgctccgctgtcggcatccagaaattgcgtggcggagcggcagacgtgaggcggcacggcaggcggcctcttcctcctctcacggcaccggcagctacgggggattcctttcccaccgctccttcgctttcccttcctcgcccgccgtaataaatagacaccccctccacaccctctttccccaacctcgtgttcgttcggagcgcacacacacgcaaccagatctcccccaaatccagccgtcggcacctccgcttcaaggtacgccgctcatcctccccccccccctctctctaccttctctagatcggcgatccggtccatggttagggcccggtagttctacttctgttcatgtttgtgttagagcaaacatgttcatgttcatgtttgtgatgatgtggtctggttgggcggtcgttctagatcggagtaggatactgtttcaagctacctggtggatttattaattttgtatctgtatgtgtgtgccatacatcttcatagttacgagtttaagatgatggatggaaatatcgatctaggataggtatacatgttgatgcgggttttactgatgcatatacagagatgctttttttctcgcttggttgtgatgatatggtctggttgggcggtcgttctagatcggagtagaatactgtttcaaactacctggtggatttattaaaggataaagggtcgttctagatcggagtagaatactgtttcaaactacctggtggatttattaaaggatctgtatgtatgtgcctacatcttcatagttacgagtttaagatgatggatggaaatatcgatctaggataggtatacatgttgatgcgggttttactgatgcatatacagagatgctttttttcgcttggttgtgatgatgtggtctggttgggcggtcgttctagatcggagtagaatactgtttcaaactacctggtggatttattaattttgtatctttatgtgtgtgccatacatcttcatagttacgagtttaagatgatggatggaaatattgatctaggataggtatacatgttgatgtgggttttactgatgcatatacatgatggcatatgcggcatctattcatatgctctaaccttgagtacctatctattataataaacaagtatgttttataattattttgatcttgatatacttggatgatggcatatgcagcagctatatgtggattttttagccctgccttcatacgctatttatttgcttggtactgtttcttttgtccgatgctcaccctgttgtttggtgatacttc

SEQ ID NO: 3 - DNA, 4101 bp, synthetic construct
  misc_feature 1..4101: note = Cas9 nt sequence
  source 1..4101: mol_type = other DNA
gacaagaagtactccattggcctggcgattgggacaaactcggtggggtgggccgtgattacggatgagtacaaggttccaagcaagaagttcaaggtcctcgggaacacagatcggcattcgattaagaagaatctcattggggcgctcctcttcgactcgggggagacagcggaggctaccaggctcaagcggacagccaggcggcggtacacaaggcggaagaatcgcatctgctacctccaggagattttctcgaatgagatggcgaaggtggacgacagcttcttccatcggctggaggagtccttcctggtggaggaggataagaagcacgagaggcatccaattttcgggaacatcgtggacgaggttgcgtaccatgagaagtaccctacaatctaccatctgcggaagaagctggttgactccacagacaaggcggacctgaggctgatctacctcgctctggcccacatgattaagttccgcgggcatttcctgatcgagggggacctgaatcccgacaattcggatgtggacaagctcttcatccagctggtgcagacctacaaccagctgttcgaggagaatcccatcaatgcgtcgggcgttgacgctaaggccattctgtccgctaggctgtcgaagagcaggaggctggagaacctgatcgcccagctgccaggcgagaagaagaatgggctcttcgggaatctgattgcgctctccctggggctgacaccgaacttcaagagcaatttcgatctggctgaggacgcgaagctccagctctcgaaggacacttacgacgatgacctcgataacctcctcgcgcagatcggggaccagtacgctgatctcttcctcgccgctaagaacctctcggatgctatcctgctctccgacattctccgggttaataccgagattacaaaggccccactgtcggcgtccatgatcaagcggtacgatgagcatcatcaggatctcaccctgctcaaggccctcgtgcggcagcagctgcccgagaagtacaaggagattttcttcgaccagagcaagaatgggtacgctggctacattgacggcggggcctcacaggaggagttctacaagttcatcaagccaatcctggagaagatggatgggacagaggagctgctggtgaagctcaaccgggaggatctgctcaggaagcagcggacgttcgacaacgggtcgattccccatcagatccacctgggggagctgcacgcgatcctgcgccggcaggaggatttctaccctttcctgaaggataatcgggagaagatcgagaagattctcaccttccggattccctactacgtcgggccactcgcgcggggcaatagcaggttcgcctggatgacacggaagagcgaggagacaatcaccccctggaacttcgaggaggttgtcgacaagggggcgtccgcccagtcattcattgagcggatgaccaatttcgacaagaatctgccaaatgagaaggttctcccaaagcatagcctcctctacgagtacttcactgtttacaacgagctgaccaaggtgaagtatgtgaccgagggcatgcggaagcccgcgttcctgtccggcgagcagaagaaggccattgtggacctcctgttcaagaccaatcgcaaggtcacagtcaagcagctcaaggaggattacttcaagaagatcgagtgcttcgactcggttgagattagcggggtggaggatcggttcaacgcgagcctcggcacttaccacgacctcctgaagatcatcaaggataaggacttcctcgacaacgaggagaacgaggatattctggaggacatcgtgctcaccctgacgctgttcgaggatcgggagatgatcgaggagcgcctgaagacctacgctcatctcttcgatgataaggtcatgaagcagctgaagaggaggcggtacaccgggtggggccgcctgagcaggaagctcattaacgggatcagggacaagcagagcggcaagaccatcctggacttcctcaagagcgatggcttcgccaaccggaatttcatgcagctcatccacgacgactccctcaccttcaaggaggacattcagaaggctcaggtcagcggccagggcgactcgctgcatgagcacatcgctaacctggcgggcagcccagccatcaagaagggcatcctccagacagtgaaggtcgtggatgagctggtgaaggtcatgggccggcataagcccgagaatattgtgattgagatggcgcgggagaatcagaccactcagaagggccagaagaactcgcgggagcgcatgaagaggatcgaggaggggattaaggagctgggcagccagattctcaaggagcaccccgtggagaatacccagctccagaacgagaagctgtacctctactacctccagaatgggcgggacatgtatgttgatcaggagctggacatcaatcgcctctcggattacgacgtggaccacatcgtgccccagagcttcctgaaggatgatagcatcgacaataaggtcctgacccgctccgacaagaatcgcggcaagagcgacaacgtgccgagcgaggaggtcgtgaagaagatgaagaactactggcggcagctgctgaacgcgaagctcattacacagcggaagttcgataacctgacgaaggcggagaggggcggcctctccgagctggacaaggcgggcttcattaagaggcagctcgtggagactcgccagatcaccaagcacgtggctcagatcctcgatagccggatgaatacgaagtacgatgagaatgacaagctcatccgggaggtgaaggtaatcaccctgaagtcaaagctcgttagcgatttccggaaggacttccagttctacaaggtgcgggagattaacaactaccatcatgcgcacgatgcgtacctcaatgcggtggtgggcacagccctgattaagaagtaccccaagctggagagcgagttcgtctacggggactacaaggtgtacgatgttcggaagatgatcgccaagagcgagcaggagattgggaaggccaccgctaagtacttcttctactcgaatattatgaatttcttcaagaccgagatcacactcgctaatggggagattcggaagcggcccctcatcgagactaacggggagactggcgagattgtgtgggacaaggggcgcgacttcgctaccgtgcgcaaggtcctctcgatgccccaggttaatattgttaagaagacagaggtgcagacgggcgggttctccaaggagtctatcctgccgaagcggaactcggacaagctgatcgcccgcaagaaggattgggaccccaagaagtacgggggattcgatagcccaaccgtggcttacagcgtcctggtggtcgccaaggttgagaaggggaagtcgaagaagctcaagagcgttaaggagctgctgggcatcaccatcatggagcggtccagcttcgagaagaatcctatcgacttcctggaggctaaggggtacaaggaggtcaagaaggacctgatcattaagctgcccaagtactctctgttcgagctggagaacgggaggaagcggatgctggcgtctgctggcgagctacagaagggcaatgagctggcgctcccctcgaagtatgtcaacttcctctacctggcttcccattacgagaagctgaagggctcgcccgaggataatgagcagaagcagctcttcgtggagcagcacaagcactacctcgacgagatcattgagcagatttcggagttctcgaagcgggtcattctcgcggacgcgaacctcgacaaggtcctctcggcgtacaacaagcaccgggacaagcccatccgggagcaggccgagaacattatccacctcttcacactgaccaacctcggcgctcccgccgcgttcaagtacttcgacaccaccattgaccgcaagagatacacatccaccaaggaggtgctggacgcgaccctcatccaccagagcatcacaggcctctacgagacacggatcgacctctcgcagctcgggggcgat

SEQ ID NO: 4 - DNA, 4092 bp, synthetic construct
  misc_feature 1..4092: note = Cas9 nt sequence
  source 1..4092: mol_type = other DNA
gacaagaagtactcgatcggcctggcgattggcacaaacagcgtggggtgggctgtgatcactgatgagtacaaggtgccatcgaagaagttcaaggtgctggggaatacagaccggcattcgatcaagaagaatctcattggcgctctcctcttcgattccggcgagactgctgaggcgacccgcctgaagcgcaccgcccggcggcgctacactcggcggaagaataggatttgctacctccaggagattttctcgaatgagatggccaaggtggatgacagcttcttccaccgcctggaggagtcgttcctggtcgaggaggacaagaagcatgagcggcaccctatcttcgggaatatcgttgatgaggtcgcctaccacgagaagtaccccactatctaccatctccgcaagaagctcgtggacagcacagataaggccgacctccgcctgatctacctcgccctcgcgcacatgattaagttccgggggcacttcctcattgagggggatctgaatcccgataactccgacgtggacaagctgttcatccagctggtgcagacatacaaccagctgttcgaggagaatcccatcaacgcgagcggcgtggacgctaaggccattctgtcggctaggctctcgaagtcgaggcggctggagaacctgattgcgcagctccccggcgagaagaagaacgggctgttcgggaatctcatcgccctctccctcggcctcacaccaaacttcaagagcaatttcgacctggctgaggacgctaagctgcaactctcaaaggatacatacgatgacgacctggacaatctcctggctcagatcggcgaccagtacgctgacctgttcctcgcggccaagaatctgtcggacgcgattctcctcagcgacatcctgcgcgtcaataccgagattacgaaggctccactgtctgcgtcaatgattaagcggtacgatgagcatcaccaggatctgaccctcctgaaggcgctcgtgcggcagcagctgcccgagaagtacaaggagattttcttcgatcagagcaagaatggctacgccggctacatcgacgggggcgcgagccaggaggagttctacaagttcatcaagcccatcctggagaagatggacggcaccgaggagctactcgtgaagctcaatcgggaggatctcctccggaagcagcggacattcgataacgggtctatcccacaccagatccacctcggcgagctgcatgcgattctgcggcggcaggaggatttctaccctttcctgaaggacaaccgggagaagatcgagaagatcctcacattccggattccatactacgtcggccccctggcgaggggcaatagccggttcgcgtggatgacaaggaagtccgaggagactattaccccgtggaatttcgaggaggtggttgacaagggcgcttccgcgcagagcttcattgagcggatgacaaacttcgacaagaatctccccaacgagaaggtcctgccgaagcatagcctcctgtacgagtacttcaccgtctacaatgagctaactaaggtcaagtatgtgacagagggcatgaggaagccagccttcctctcaggcgagcagaagaaggccattgtggacctcctgttcaagacaaaccgcaaggtgacagtgaagcagctgaaggaggattacttcaagaagattgagtgcttcgactcagtggagatttcaggcgtggaggatcggttcaacgcgagcctggggacttaccacgacctgctgaagattattaaggacaaggacttcctggataacgaggagaatgaggacatcctggaggatattgtgctcaccctcaccctgttcgaggacagggagatgattgaggagaggctcaagacctacgcgcacctgttcgatgacaaggtcatgaagcagctgaagaggcggcgctacactgggtggggccgcctgtcgcggaagctgatcaacggcattcgggataagcagtccgggaagaccattctggatttcctgaagtcggacggcttcgccaacaggaatttcatgcagctgatccacgacgactccctcaccttcaaggaggacattcagaaggcccaggttagcggccagggggactcactccacgagcatattgccaatctggccggctctccagctatcaagaagggcatcctgcaaacagttaaggttgttgacgagctggttaaggtcatggggcggcataagcccgagaacattgtcatcgagatggctcgggagaaccagacaactcagaagggccagaagaactccagggagcgcatgaagcggattgaggagggcattaaggagctggggtcccagatcctcaaggagcaccctgtcgagaacactcagctgcaaaacgagaagctctacctgtactacctccagaacgggcgggatatgtatgtggatcaggagctggacatcaacaggctctccgactacgacgtggatcacattgtcccacagtctttcctcaaggatgattccatcgacaacaaggtgctgacgcgcagcgacaagaatagggggaagtcggacaacgttccgagcgaggaggtcgtgaagaagatgaagaattactggaggcagctcctgaatgcgaagctgatcactcagaggaagttcgacaatctgacaaaggcggagaggggcgggctctcggagctggataaggcgggcttcatcaagcggcagctcgttgaaacccggcagatcaccaagcatgtcgcccagatcctcgatagccgcatgaacaccaagtacgatgagaacgacaagctcattcgggaggttaaggtcattacgctgaagtccaagctcgtcagcgacttcaggaaggatttccagttctacaaggttcgggagattaacaactaccaccacgcgcatgatgcgtacctgaacgctgttgtcggcactgctctcatcaagaagtacccaaagctggagtccgagttcgtctacggggactacaaggtctacgatgtccggaagatgatcgccaagtcggagcaggagatcgggaaggctactgcgaagtacttcttctacagcaacattatgaatttcttcaagacggagattacgctggcgaacggggagattaggaagaggcccctcattgagactaatggggagacaggcgagattgtttgggacaagggccgcgacttcgcgactgtgcggaaggtcctgtccatgccacaggtgaatattgttaagaagacagaggtgcagactgggggcttctcgaaggagagcattctcccaaagcggaacagcgataagctcatcgcgcgcaagaaggattgggaccctaagaagtacggcggcttcgattctcccactgtggcctactccgttctcgtggttgccaaggttgagaaggggaagtcgaagaagctgaagtcggtcaaggagctgctcgggattacaatcatggagcggagcagcttcgagaagaaccctattgatttcctggaggccaagggctacaaggaggttaagaaggatctcattatcaagctccctaagtactctctgttcgagctggagaatggccggaagaggatgctggcctcggctggcgagctacagaaggggaatgagctggccctcccgtcgaagtatgtgaatttcctgtacctcgcgtcgcactacgagaagctcaagggcagcccggaggataatgagcagaagcagctcttcgtggagcagcataagcactacctggacgagatcattgagcagatcagcgagttctcgaagcgggttattctggctgatgctaacctggacaaggttctgagcgcctacaataagcatcgcgacaagccgattcgcgagcaggcggagaatattatccacctgttcaccctcactaacctcggggctcccgcggccttcaagtacttcgataccacaatagataggaagcggtacacctcgacgaaggaggtcctcgacgccacactcatccatcagtcgattacaggcctgtacgagacacggattgacctctcgcagctg

SEQ ID NO: 5 - DNA, 4101 bp, synthetic construct
  misc_feature 1..4101: note = Cas9 nt sequence
  source 1..4101: mol_type = other DNA
gacaagaagtattccataggcctggctatcggcaccaacagcgtgggctgggccgtcatcaccgacgagtacaaagtgccgagtaaaaagttcaaagtgctcggcaacaccgaccgccactccataaagaaaaacctgatcggggcgctcctgttcgacagcggcgagacggcggaggccacccgcttgaaacgcacggcccgacggcgctacacgcggcgcaagaaccggatctgttacctacaggagattttctctaacgagatggcgaaggtggacgactcgttctttcaccgcctcgaagagtccttcctcgtggaggaggacaagaaacacgagcgccacccgatcttcggcaacatcgtggacgaggtggcctaccacgagaagtacccgaccatctaccacctccggaagaaactcgtggacagcacggacaaggccgacctgaggctcatctacctcgccctggcgcacatgattaagttccggggccacttcctgatcgagggcgacctgaacccggacaacagcgacgtggacaagctgttcatccagctagtccagacctacaaccagcttttcgaggaaaaccccatcaacgccagcggggtggacgcgaaggcgatcctgtccgcccggctgagcaagtcccggcggctggagaacctcatcgcgcagttgcccggcgagaagaagaacgggctgttcgggaacctgatcgccctctccctggggctcaccccgaacttcaagtccaacttcgacctcgccgaggacgccaaactacagctgagcaaggacacctacgacgacgacctcgacaacctgctggcccagatcggggaccagtacgcagacctgttcctcgccgccaagaacctctccgacgccatcctgctgtcggacatcctgcgggtgaacacggagatcacgaaggccccgctctcggcctcgatgattaaacgctacgacgagcaccaccaggacttgaccctcctcaaggcgctggtccgccagcagcttcccgagaagtacaaggaaatctttttcgatcagagcaagaacgggtacgccgggtacatcgacggcggggcgtcccaggaggagttctacaagttcatcaagcccatcctggagaaaatggacgggaccgaggagctgctcgtgaagctcaaccgcgaagatttgctccgcaagcagcgcacgttcgacaacgggtcgatcccgcaccagatccacctgggcgagctgcacgcgatcctcaggcgtcaggaagacttctaccccttcctcaaggacaaccgcgagaagatagagaagattctgaccttcagaattccttattacgtgggcccgctggctcggggcaactcgcgcttcgcctggatgacgcgcaagtccgaggagaccatcaccccgtggaacttcgaggaggtggtggataagggtgcctcggcccagtccttcatcgagcggatgaccaacttcgacaagaacctgccgaacgagaaggtgctccccaagcacagcctgctctacgaatatttcacggtgtacaacgagctgacgaaggtcaagtacgtgaccgagggaatgaggaaacctgcattcctctccggggagcagaagaaagccatagtcgacctcctgttcaagaccaaccggaaggtcaccgtcaagcagctcaaggaggactacttcaagaagatcgagtgcttcgattcagtggagatcagcggcgtcgaggaccggttcaacgccagcctgggcacctaccacgacctgctcaagatcatcaaggacaaggacttcctcgacaacgaggagaacgaggacatcctggaggacatcgtgctgaccctgacgctcttcgaggaccgcgagatgatcgaggagcgcctcaagacctacgcccacctgttcgacgacaaggtgatgaagcagctcaagcggcggagatatactgggtggggccgcctctcccggaagctcattaacggtatcagggataagcagtccgggaagacgatcctcgacttcctcaagtcggacgggttcgccaaccgcaacttcatgcagctcatccacgacgactccctgacgttcaaggaggacatccagaaggcccaagtgtctggtcaaggtgactcgctccacgagcacatcgccaacctcgcgggcagcccggccatcaagaagggaatactccagaccgtcaaggtggtggacgagctggtgaaggtcatgggccgccacaagccggagaacatcgtcatcgagatggcgcgggagaaccagaccacgcagaaggggcagaaaaatagccgtgagcgcatgaagcgcatcgaggaggggattaaggagttgggcagccagatcctcaaggagcaccctgtggagaacacgcagttgcaaaacgagaagctctacctgtactacctccagaacgggagggatatgtacgtggaccaagaactggacatcaaccgcctgtccgactacgacgtggaccacatcgtgccgcagagcttcctcaaggacgacagcatcgacaacaaggtgctcacccggtccgacaagaatcggggcaagtccgacaacgtgcccagcgaggaggtcgtcaaaaagatgaaaaactactggcgacaactactgaacgccaagctcatcacccagcgcaagttcgacaacctcacaaaagccgagcgcggcgggttgagcgagctggacaaggccgggttcatcaagcgccagctcgtcgagacgcgccagatcacgaagcacgtcgcgcagatactcgacagccggatgaacaccaagtacgacgagaacgacaagctcatccgggaggtgaaggtcatcaccctcaagtcgaagctcgtgagcgacttccgcaaggacttccagttctacaaggtccgggagatcaacaactaccaccacgcccacgatgcttatcttaacgccgtggtggggacggccctcattaagaaatacccgaagctggagtcggagttcgtgtacggcgactacaaggtgtacgacgtcaggaagatgatcgccaagtccgaacaggagatcgggaaggccacggcgaaatacttcttctacagcaacatcatgaacttcttcaagaccgagatcaccctcgccaacggcgagatccgcaagcgcccgctcatcgagacgaacggggagaccggcgagatcgtctgggacaaggggcgcgacttcgccactgtgcggaaggtgctgtcgatgccccaggtcaacatcgtcaagaagacggaggtccagacgggcgggttcagcaaggagagcatcctgccgaagcgcaacagcgacaagctgatcgcccgcaaaaaggactgggatccaaaaaagtacggcggcttcgacagccccaccgtcgcctacagcgtcctcgtcgtcgctaaagtcgagaagggcaagtccaaaaagctcaagagcgtcaaggagctgctcgggatcaccatcatggagcggtccagcttcgagaagaacccaattgatttcctggaggcgaagggctacaaggaggtcaagaaagacctcatcataaagctgccgaagtactcactcttcgagctggagaacgggcgcaagcggatgctggcgtcggccggagagctccaaaagggcaacgagctggcgctgccgagcaagtacgtgaacttcctctacctggcgtcccactacgagaagctcaagggcagtccagaggataacgagcagaagcagctattcgtggagcagcacaagcactacctggacgagatcatcgagcagatcagcgagttctccaagcgcgtcatcctggcggacgccaacctggacaaggtgctgtccgcgtacaacaagcaccgcgacaagccgatccgcgagcaagccgagaacatcatccacctgttcaccctcacgaacctcggggcacccgccgccttcaaatatttcgacacgaccatcgaccgcaagcgctacaccagcacgaaggaggtgctcgacgccaccctgatccaccagagcatcaccgggctgtacgagacccgcatcgacctctcgcagctcggcggggac

SEQ ID NO: 6 - DNA, 4101 bp, synthetic construct
  misc_feature 1..4101: note = Cas9 nt sequence
  source 1..4101: mol_type = other DNA
gacaagaagtacagtattggattggccatcgggacgaacagcgtgggctgggccgtcatcaccgacgagtacaaggtgccatccaagaagtttaaggttctggggaataccgaccgccactcgatcaagaaaaatctcatcggggcgctgcttttcgacagcggcgagacggcggaagcgacgcggctcaagcggacggctcgtcgccgttacacccggcgtaagaaccgcatctgttacctccaggagatattcagcaacgagatggcgaaggtggacgactcctttttccaccgtcttgaggagtccttcctggtcgaggaggacaagaagcacgagcgccacccgatcttcgggaacatcgtggacgaggtggcctaccacgagaagtaccccacgatctaccacctccgcaaaaaactcgtggactcaactgacaaggccgatttgaggcttatctacctcgccctcgcccacatgattaagttccgtgggcacttcctaatcgagggtgacctcaaccccgacaactctgacgtggacaagctgttcatccagcttgtgcagacctacaatcagctctttgaggagaatccgatcaacgcatctggtgtggacgcaaaggccatcctcagcgcgcggctgagcaagtctaggcggttggagaacctgatcgcccaactgcccggcgagaagaaaaatggcctcttcggcaacctgatcgccctgtcgctggggctcacgccgaacttcaagagtaactttgacctggcggaggacgctaagctccagctatctaaggacacatacgacgacgacctggacaacctgctggcccagatcggcgaccagtacgccgacctcttcctagccgccaagaacctgtccgacgccatcctcctcagcgacatcctgcgcgtgaacacggagatcacgaaggctccgctcagcgcctccatgattaagcggtacgacgagcaccaccaagacctaactttactcaaagccctcgtgcggcagcagcttcccgagaagtacaaagagatattttttgatcagtccaagaacggttatgcgggctacatcgacggcggcgcgagccaggaggagttctacaagttcatcaagcccatcctggagaagatggacggcacggaggagctgctcgtgaagctcaaccgtgaagacctcctgcgaaagcagcgaaccttcgacaacggttcgatcccgcaccagatccacctcggggagctgcacgccatcctgaggcgacaggaggacttctaccctttcctaaaggacaaccgcgagaagattgaaaaaatcctgacgtttcgcataccctactacgtcggcccgctggcgcgcggcaactcccggttcgcctggatgacccgtaagagcgaggagacgatcaccccgtggaacttcgaggaggtcgtggacaagggcgcgagcgcgcagagcttcatcgagcgcatgaccaacttcgacaagaacctcccgaacgagaaggtgctcccaaagcactccctcctgtacgagtatttcaccgtgtacaacgagttgacaaaggtgaagtacgtgacggagggaatgcggaagcctgcgttcctctcgggcgagcagaagaaggcaatcgtggacctgctcttcaagaccaaccggaaggtgacggtgaagcagctcaaggaggactacttcaaaaaaatcgagtgcttcgactccgtggagataagcggcgtggaggaccgattcaacgcctccctcggcacctaccacgacctccttaagatcatcaaggacaaggacttcctggacaacgaggagaacgaggacatcctggaggacatcgtgctcaccctgaccctcttcgaggaccgggagatgatcgaggagcgcctcaagacgtacgcccacttgttcgacgacaaggtgatgaagcagctcaagcggcggcgatacaccgggtggggccgcctatcccgcaaacttatcaacggcatccgcgacaagcagtccggcaagacgatcctggatttcctcaagtcggacgggttcgccaaccggaacttcatgcagctcatccacgacgacagcctcacgttcaaggaggacatccagaaggcccaagtgagcggtcaaggggacagcctccacgagcacattgcgaaccttgctgggagccctgcgatcaagaaggggatattgcaaaccgtgaaggtcgtggacgagttggtgaaggtcatggggcgacacaagcccgagaacatcgtgatcgagatggccagggaaaatcagaccacgcagaagggccaaaaaaacagccgcgagcggatgaagcggatcgaggagggcatcaaggagctggggtcgcagatcctcaaggagcacccggtggagaacacgcagctccagaacgagaagctgtacctctattacctacagaacgggcgggatatgtacgtggaccaggagctagacatcaaccgcctgtccgactacgacgtggaccatatcgtcccgcagtcgttcttgaaggacgacagcatcgacaacaaggtgctcacaagatcggataagaatcgaggcaagtccgacaacgtgccctcggaggaggtggtcaagaaaatgaaaaactactggcggcagttgctgaacgccaagctcattacgcagcggaagttcgacaacctgacgaaggctgaacgtggtgggctcagcgagctagacaaggcggggttcatcaagcggcagctcgtcgagacccggcagatcaccaagcacgtggcgcagatcctggactcgcgcatgaacaccaagtacgacgagaacgacaagctcatccgtgaggtgaaggtcatcacccttaagtctaagctggtcagtgacttccgcaaggacttccagttctacaaggtccgggagatcaacaactaccaccacgcgcacgacgcctacctcaacgcggtggtggggacggcgcttattaagaaatatcccaagctggaaagcgagttcgtttacggcgactacaaggtgtacgacgtccgcaagatgatcgcaaagtcggaacaggaaatcggaaaggcgacggccaaatatttcttttactccaacatcatgaatttttttaagacggagatcaccctggcgaacggggagatccgcaagcggcccctcatcgagaccaacggggagacgggcgagatcgtctgggacaagggccgggacttcgccaccgtgcggaaggtgctttctatgcctcaagtcaatatcgtcaaaaagacagaggtgcagaccggcgggttcagcaaggagtctatcctgccgaagcgcaactcggacaagctcatcgcgcgcaagaaagactgggaccccaaaaaatatggcgggttcgactcgccgaccgtcgcctacagcgtcctcgtggtggctaaggtcgagaagggcaagagcaaaaagctaaagtcggtgaaggagctgctgggcatcaccatcatggagcgctcgtctttcgagaagaatccaatcgacttcctagaggcgaaggggtacaaggaggtcaaaaaggatcttatcatcaaactgccgaagtacagtctgttcgagctggagaacgggcggaagcggatgctggctagtgcgggcgagttgcagaagggcaacgagttggcactgccctccaagtacgtgaacttcctgtacctggcctcccactacgagaagctcaaggggagccccgaggacaacgagcagaagcagctattcgtcgagcagcacaagcactacctggacgagatcatcgagcagatcagtgagttctccaagcgggtcatcctcgcggacgccaacctggacaaggtgctgagcgcgtacaacaagcacagggacaagccaatcagggaacaggccgagaacatcatccacctgttcaccctgaccaacctgggtgcaccggctgccttcaagtactttgacacgaccatcgaccggaagcgctacacctccacgaaggaggtgctggacgccacgctgatccaccagagcatcaccgggctctacgagacacggatcgacctgagccagcttggcggggac

SEQ ID NO: 7 - DNA, 4092 bp, synthetic construct
  misc_feature 1..4092: note = Cas9 nt sequence
  source 1..4092: mol_type = other DNA
gacaaaaagtattccattggactcgctatcggcacgaacagcgtcgggtgggcggtcatcactgacgagtacaaggtgccgagcaagaagtttaaggtgctgggaaacaccgacaggcactcgatcaagaaaaatcttatcggggccctactcttcgactccggagaaaccgccgaggccacccggttgaagcgcacggcccgccgtcgctacaccaggcgcaagaaccggatctgctacctccaggagatattcagcaatgagatggcgaaggtggacgactcgttttttcacaggctagaggagtctttcctcgtggaggaggacaagaaacacgagcgccaccccatcttcggcaacatcgtggatgaggtggcatatcacgagaagtacccaaccatctaccacctccgcaaaaagctcgtggactctaccgacaaggccgacctccgtctgatctacctcgcgctggcccacatgattaagttccgaggacactttctgatcgagggcgacctgaacccagacaacagcgacgtggacaagctgttcatccaacttgtccagacctacaatcagctcttcgaggagaaccctatcaacgcctcgggcgtggacgcgaaggccatcctgtccgcccgcctgagcaagtcgcggcggctggagaacctgatcgcccagctccccggcgaaaaaaagaacggcctcttcggcaacctcatcgcgttgtcgctggggctcaccccgaacttcaagtccaacttcgacctggccgaggacgctaaactccagctctcgaaggatacctacgacgacgacctcgacaacctgctggcccagatcggcgaccagtacgcggaccttttcctggcggccaagaacctgagcgacgcgatcctccttagcgacatactccgtgtgaacaccgagatcacgaaggccccgctctccgcgtccatgattaagcgctacgacgagcaccaccaagaccttaccctgcttaaggcgctggtcaggcagcagttaccggagaagtacaaggagatcttttttgatcaatctaagaacggttacgccgggtacatcgacggcggcgcgtcccaggaggagttctacaagttcatcaagccgatcttggagaaaatggacgggaccgaggagctgctcgtgaagctcaaccgcgaagacctcctccgcaagcagcgcaccttcgacaacgggagcatcccgcaccagatccacctgggagagctgcacgcgatcctgcggagacaagaggacttctaccccttcctcaaggacaaccgggagaagattgaaaaaatacttacttttcgtatcccgtactacgtcgggccccttgcgaggggcaactccagattcgcgtggatgacccgcaagtccgaggagaccatcaccccgtggaacttcgaggaggtggtggacaagggcgcgtcggcccagtcgttcatcgagcgcatgaccaacttcgacaagaaccttccgaacgagaaggtgctcccgaagcacagcctgctctacgaatattttactgtgtacaacgagctgacgaaggtcaagtacgttacggaggggatgaggaagcccgccttcctctccggcgagcagaagaaagccattgtggatctcctgttcaagaccaaccgcaaggtgacggtgaaacagctcaaagaggactacttcaagaagatcgagtgcttcgactccgtagagatcagcggggtcgaggaccgcttcaacgcctcgctgggcacgtaccacgacctgctaaagattatcaaggacaaagacttcctagacaatgaggagaacgaggacattctggaggacatcgtgctgactctgacgctgttcgaagaccgcgagatgatcgaggagcggcttaagacgtacgcccacctgttcgacgacaaggtgatgaagcagttgaaacggcggcgctacaccgggtggggccgcctctcccgcaagctcatcaacggcatccgcgacaagcagtcggggaagacgatcctggacttcctcaagagcgacggcttcgccaaccgaaacttcatgcagctaatccacgacgacagcctgacgttcaaggaggacatccagaaggcccaagtgagcggccagggagactcgctacacgagcatatcgccaacctggctggcagcccggcgattaagaaaggaatcctccaaaccgtcaaagtggtggacgagctggtgaaggtgatgggccgccacaagcccgagaacattgtgatcgagatggcgcgggagaaccagacgacgcagaagggccaaaaaaatagcagggaaaggatgaagcgaatagaggaggggatcaaggagctggggagccagattctcaaagagcacccggtcgagaacacacagctccagaacgagaagctgtacctctactacctccaaaacggccgcgatatgtacgtggaccaggaactagacatcaaccggctgagcgactatgacgtggaccacatcgtgccgcagtccttcctcaaggacgactcgattgacaacaaagtgctcactagatccgacaagaacagaggcaagagcgataacgtcccgtcggaggaggtcgtcaagaaaatgaaaaactactggcggcagctcctaaacgccaagctcatcacgcagcgtaagttcgacaacctgacgaaggcggagcggggcgggctgagcgagctggacaaagcggggttcatcaagcggcagctcgttgagacgcggcagatcacaaagcacgtcgcgcaaatcctcgactcccgcatgaacaccaagtacgacgagaacgacaagctcatccgggaggtgaaggtcattacccttaaatcgaagctcgtcagcgactttcgtaaggacttccagttctacaaggtcagagagatcaacaactaccaccacgcccacgacgcctatctgaacgccgtggtgggcaccgcgcttattaagaagtaccccaagctggagtccgagttcgtgtacggcgactacaaggtttatgacgtcaggaagatgatcgccaagtcggaacaggagatcggaaaagctaccgccaaatatttcttctatagcaacatcatgaacttcttcaaaaccgagatcaccctcgccaacggcgagatccggaagcgcccgctcatcgagaccaacggggagaccggggagatcgtctgggacaaggggcgggacttcgctactgtccgaaaggtgctctccatgccacaagtgaatatcgtcaagaaaacagaggtgcagaccggagggttcagtaaggagtccatcctgcccaagcggaactccgacaagctaattgctcgcaaaaaggattgggatcctaaaaaatatggcggcttcgactcgcccacggtcgcctactctgtgctggtcgtggcgaaggtggagaagggcaagtccaagaagctcaagagcgtcaaggagctgctggggatcacgatcatggagcgtagttcgtttgagaagaatcccatcgacttcctggaggctaagggctacaaggaggtcaaaaaggacctcatcattaagctgccgaagtacagcctcttcgagctggagaacgggcggaagcgtatgctcgcctccgctggggagttacaaaaggggaacgagctggcgctgccgtctaagtacgtcaacttcctgtacctggcctcccactacgagaagctcaaggggtcgccggaggacaacgagcagaagcagctcttcgtagagcagcacaagcactacctggacgagatcatcgagcagatttcagagttctcaaagcgggtcatcctcgccgacgccaacctggacaaggtgctctcggcctacaacaagcaccgggacaagccgatccgcgaacaggccgaaaacatcatccacctgttcacgctcaccaacctcggtgccccggcggccttcaagtactttgacacgaccatcgaccggaagcgctatacctcgacgaaggaggtgctggacgccaccctgatccaccagtccatcaccgggctttacgagacccggatcgacctctcgcagcta

SEQ ID NO: 8 - DNA, 4101 bp, synthetic construct
  misc_feature 1..4101: note = Cas9 nt sequence
  source 1..4101: mol_type = other DNA
gacaagaagtatagtattggactcgccatcggaaccaactctgtggggtgggctgttattacagatgaatataaggtgccatccaaaaagtttaaagttctgggcaatactgatagacactcaatcaagaagaatctgataggtgcacttctgtttgatagtggagagactgccgaggcaaccagacttaaaaggactgcaagaagaagatataccagaagaaagaataggatttgctatttgcaggaaatcttcagcaacgaaatggccaaggttgatgactcatttttccataggttggaggagagttttcttgtggaggaagataagaagcacgaaagacacccaattttcgggaatatagtggacgaggtggcttatcatgagaagtatcccactatctaccacctgagaaagaaacttgtggactcaaccgataaggctgatcttaggcttatatacttggcccttgcacatatgatcaaattcaggggccattttcttatcgaaggcgatcttaatcccgataactcagatgtggacaagctgtttatacaacttgtgcaaacctacaatcaactcttcgaggagaatcccattaacgcctccggcgtggatgcaaaagccatactgtcagccagactgagcaaaagtaggagactggagaatcttatagcccaactgcccggtgaaaagaagaatgggctcttcggaaatctgatcgctctttcattggggttgacacccaactttaagagtaactttgacttggcagaagatgcaaagttgcagctcagtaaagacacatatgacgatgaccttgacaatctcttggcacaaataggggatcaatacgctgaccttttcctcgctgccaagaacctcagcgacgctatactgttgtccgacattcttagggttaataccgaaattacaaaggcccctcttagtgcaagtatgatcaaaaggtatgatgagcatcaccaagaccttacactgctgaaggctctggttagacagcaactccctgaaaagtataaggaaatattcttcgaccaaagtaagaacgggtacgccggttatattgatgggggcgcaagtcaagaagaattttacaaattcatcaagccaattcttgaaaagatggacgggactgaggaattgctggtgaaactgaatagagaggaccttcttagaaaacagaggacatttgacaatgggtccatcccacaccagattcatctgggggaactccacgcaatattgaggagacaagaagacttttacccattccttaaggataatagagagaaaatcgaaaaaatcctgactttcaggattccttactatgttgggccactggccagggggaactcaagattcgcttggatgacaaggaagtcagaagaaaccataaccccttggaattttgaagaggtggttgataagggggcatcagcccagtctttcatagagaggatgaccaactttgataaaaatcttccaaatgagaaggttttgccaaaacatagtcttttgtacgagtactttactgtttataacgaattgaccaaggtgaagtatgtgaccgagggaatgaggaagccagcatttttgtccggggagcaaaagaaagcaatcgttgatcttctcttcaagaccaacagaaaagtgaccgtgaaacaactgaaggaagactacttcaaaaagatagaatgtttcgattcagtggaaattagcggtgttgaagacaggttcaatgcttcattgggtacttaccacgacctgttgaagataatcaaagacaaggactttctcgataatgaggagaacgaagacatcttggaagacattgtgcttacactcactttgtttgaggacagggaaatgattgaggaaagactcaaaacttacgctcatttgtttgatgataaggttatgaaacaactaaaaagaagaaggtacaccggctggggaagattgagtaggaaactgatcaacggtattagagataaacaatccggaaagactatcctcgatttccttaagagtgatggctttgcaaataggaattttatgcagctgattcatgacgactcacttaccttcaaagaagacatccaaaaagctcaggtgtctgggcaaggcgacagtctgcatgaacatatagctaacttggctgggagtcccgccatcaagaaggggatacttcaaacagttaaagttgtggacgaattggtgaaggtaatgggaaggcacaagcctgaaaatatagtgatagaaatggcaagggaaaatcaaacaacccagaagggacagaagaacagtagggaaaggatgaaaaggatagaagaggggatcaaagagcttggtagccagatcctcaaggaacatccagtggagaatacccaacttcaaaacgagaaactctatttgtactacttgcagaacggaagagatatgtatgtggaccaagagcttgatattaacaggctgagcgattatgacgttgaccacatagtgccccaatcattcctcaaggatgactctattgataataaggtgctgacaaggagtgacaagaatagagggaaatccgacaacgttccatccgaggaagttgtgaagaagatgaagaactactggaggcagttgctgaacgctaagctcattacccagaggaaattcgataacctgaccaaagcagagagaggcgggctgagcgaactcgataaagcaggtttcatcaagagacaactcgtggagactaggcaaattactaagcacgtggctcaaatactcgacagcaggatgaacacaaagtacgacgagaacgacaagctcattagagaggttaaggttattactctgaaaagtaaattggttagcgatttcagaaaggatttccaattctataaggttagagagatcaacaattatcatcatgcacatgatgcctatctgaatgctgtggttggtacagcccttatcaagaagtaccctaagctagagagcgagtttgtgtacggagattataaggtgtatgatgtgaggaaaatgatcgctaaaagtgagcaagagattggaaaggctaccgccaaatacttcttttattccaatattatgaatttcttcaagacagaaatcaccctggctaacggcgagataaggaagaggccgcttatcgaaactaatggggagacaggcgaaatagtgtgggacaaagggagggatttcgcaactgtgaggaaggttttgagcatgcctcaggtgaatatcgttaagaaaaccgaagttcaaactggagggttctctaaggaaagcattctccccaagaggaactccgacaagctgattgctagaaagaaagactgggaccccaagaagtatggcggattcgactcacccactgtggcatatagcgttctcgtggtggcaaaggttgaaaagggtaaatccaaaaaactcaaatccgtgaaggaactccttggcataactattatggaaaggagtagctttgaaaagaatcccatcgactttctcgaagctaagggctataaggaagttaagaaggaccttataatcaaacttccaaaatactccctttttgagttggaaaacggcagaaagagaatgttggccagtgccggggagcttcaaaagggcaacgaactggctctgcctagcaaatatgtgaactttttgtatctggcatcacactacgagaaacttaaaggctctcctgaggacaacgagcaaaaacagctctttgttgaacagcataagcactacctcgacgagattattgagcagatcagcgagttctcaaagagagttattctggctgacgctaatcttgacaaggttttgtccgcttacaacaaacacagggataagccaatcagggagcaggcagaaaacataatccatctctttaccctgacaaacctcggtgcccccgctgctttcaagtattttgatactaccattgacaggaagagatatacttccactaaggaagtgctcgacgcaaccctcatacaccaaagtatcacaggcctctatgaaactaggatagatttgtctcaacttgggggcgat

SEQ ID NO: 9 - DNA, 4101 bp, synthetic construct
  misc_feature 1..4101: note = Cas9 nt sequence
  source 1..4101: mol_type = other DNA
gacaaaaagtattccatcgggcttgctatcggaaccaactctgtggggtgggcagttattaccgacgaatacaaggtgcccagcaagaagtttaaggttctggggaacacagatagacatagcataaagaaaaacctgataggcgcactgttgttcgactccggggaaacagccgaagctaccaggctgaagagaactgcaagaagaaggtacaccagaagaaaaaacagaatatgttatctccaagagattttctctaacgagatggccaaggtggacgactcattctttcacagactggaagaatctttccttgtggaagaagataagaaacacgagaggcaccctatttttggcaatatcgtggatgaggtggcttaccacgaaaaataccctacaatataccacctcaggaaaaaattggttgatagtacagacaaggccgacctcaggctcatctatttggccctggcccatatgattaaattcagggggcactttctcatcgagggagatttgaaccccgacaacagtgatgttgataagctctttattcagctcgtgcagacttacaatcagttgtttgaggaaaaccccattaatgcttccggggtggacgccaaggcaatcctttctgcaagactctcaaagtcaaggagactcgaaaatctgatagcacagcttccaggagagaagaagaacgggctctttggaaacctgatcgctctgtcactcggactcacacccaatttcaaaagcaattttgatttggcagaggacgctaagctgcaactcagtaaggatacctacgacgatgacttggataatctgctcgcacaaattggggaccagtatgcagacctgtttctcgcagctaagaacttgagtgacgccatattgctcagtgacatcctcagggttaataccgagattacaaaagctccactctctgcaagcatgatcaagaggtatgacgagcaccatcaagacctgacactccttaaggcgttggttaggcagcaacttcctgaaaagtataaggaaatcttcttcgatcaaagcaaaaacggctacgccggctatatagacgggggagcatcccaagaagaattttataagttcataaaacctatattggagaagatggacgggacagaggaattgctcgtgaaactgaacagggaggatctcctcaggaagcaaaggaccttcgacaatggctccatcccacatcagattcacctcggcgaactgcacgcaatactgagaagacaagaggacttttatcctttcctgaaggacaacagggagaaaatcgagaaaatcttgacattcagaatcccatactacgttgggcctctggccagaggtaacagtaggttcgcctggatgactaggaaatcagaggagactattacaccctggaactttgaagaagttgttgataagggagcttcagcacaatcattcatcgaaagaatgacaaactttgacaaaaatctgcctaatgagaaagtgctcccaaaacattccctgctgtatgagtattttaccgtttataacgagcttaccaaggtgaaatacgttactgaaggtatgagaaagccagcttttctttcaggggagcaaaagaaggctatcgtggatcttctctttaagaccaacagaaaggttaccgtgaagcagcttaaggaagactactttaaaaagatcgagtgttttgactcagtggaaataagcggtgttgaagatagattcaacgcatccttgggaacttatcatgatcttcttaagataatcaaggataaagactttctcgacaacgaggaaaacgaagatatactggaggacatagttctgacacttactttgttcgaggatagggagatgatcgaggaaagactgaaaacatatgctcaccttttcgacgacaaagttatgaaacaactcaagagaaggagatatacagggtgggggagattgagcaggaaactgattaatggtatcagagacaaacagtcaggaaaaacaatactcgactttttgaaatcagacgggttcgcaaataggaatttcatgcagcttatacacgacgattcacttacttttaaagaggacattcaaaaggctcaagttagtggacaaggtgactccctccacgaacacatcgcaaatctcgctggcagccctgcaattaagaagggtatactccagacagttaaggttgttgacgagctggttaaagtgatgggaagacacaaacccgagaacatagtgatagagatggccagggaaaaccaaaccactcaaaaagggcagaaaaattccagagagaggatgaaaaggattgaagaaggtatcaaggagctgggtagccaaattctgaaagaacatcctgtggaaaacactcaactccagaatgagaaactctatctgtactatctgcaaaatgggagagatatgtatgtggaccaggaactggacataaacaggctctcagattacgatgtggatcatatcgtgccacagtcctttcttaaggatgatagcatcgacaataaggtgcttaccaggtccgacaagaacaggggaaagtcagataacgtgccttctgaagaagttgttaaaaagatgaagaactactggagacagctgcttaacgctaagctcataacacagaggaagtttgacaacttgaccaaggccgagagaggcggactctcagaattggataaggcagggttcataaaaaggcagctggtggaaacaaggcagataactaaacatgtggctcagatcctcgatagtaggatgaatacaaaatacgatgagaacgacaagctcataagggaggttaaagtgataactctgaaatccaaactggttagcgattttaggaaggatttccagttttacaaagttagggagatcaacaattatcatcacgcccacgatgcctacttgaacgcagttgtgggtactgcacttatcaaaaagtaccctaagctggaatccgagtttgtttatggagactataaggtgtacgacgttagaaaaatgattgcaaagtcagagcaggagatagggaaagccactgcaaaatatttcttttatagcaatatcatgaatttctttaagacagaaatcacactggccaatggggaaataaggaagaggcccctgatcgaaactaatggcgagacaggggagattgtgtgggataaaggtagggactttgcaacagtgaggaaagtgctgagcatgccccaagttaatatcgttaaaaagaccgaggttcaaacagggggctttagtaaggaaagcattttgcccaagaggaatagtgacaaattgattgctaggaaaaaagattgggaccccaaaaagtatggcggatttgatagccccactgttgcttactccgtgctcgtggttgcaaaggtggagaagggaaagagcaagaaactgaagtcagttaaggaactccttggtatcactatcatggaaagaagctcctttgagaagaaccctattgacttcctggaggctaaagggtacaaagaggttaagaaagaccttatcattaaattgcccaaatatagtcttttcgagcttgaaaacggaagaaagaggatgcttgcatccgctggcgaattgcaaaagggcaatgagcttgctctcccttccaagtatgtgaacttcctttatcttgcctcacactatgaaaaactcaaaggttcacccgaagacaacgaacaaaagcaactatttgtggaacaacacaagcactacctggacgaaatcattgagcaaatttctgagttttcaaaaagggtaatcttggctgacgcaaatctcgacaaagttttgtcagcttacaacaaacatagagataagccaattagagagcaagctgagaatatcatccatctgtttaccctgactaaccttggagcgcctgctgcttttaaatatttcgacaccacaatcgacaggaagaggtacactagcactaaggaagttctcgacgccaccctcatccaccagagtattacaggcctgtacgagacaagaattgatctttctcaacttggtggtgac

SEQ ID NO: 10 - DNA, 4101 bp, synthetic construct
  misc_feature 1..4101: note = Cas9 nt sequence
  source 1..4101: mol_type = other DNA
gataagaagtactcaatcggtctggcaatcggaaccaactctgtgggttgggcagtgattacagatgagtataaggtgccaagcaaaaaattcaaggtgctgggtaataccgacagacacagcattaagaagaatttgattggagcactcctctttgactcaggggaaacagcagaggcaacaaggctgaagaggacagcaaggcggaggtacacaaggcggaaaaacaggatatgctacctccaggaaatctttagcaacgagatggctaaagtggatgatagctttttccatagactcgaagaatcctttcttgttgaagaggacaaaaagcatgaaaggcatcccatcttcggcaatatagttgatgaggttgcataccatgagaagtaccccacaatctaccacctcagaaagaaacttgtggactccacagataaagcagacctgaggctcatatacctcgcactcgcacacatgatcaagttcagagggcactttctcatcgaaggtgacctgaatccagataattcagatgtggataaactgtttatacagctggtgcaaacatacaaccaacttttcgaggaaaacccaatcaatgcctccggtgttgatgcaaaggccatcctgtcagcaagactcagcaaaagcaggcggctcgaaaacctcatcgcccagcttcccggtgaaaagaagaacgggctctttggtaatctcatcgcattgagccttggtcttactccaaacttcaagagcaattttgatctggcagaggatgctaaactgcaactctcaaaggacacatatgacgatgaccttgacaatctgttggcccagatcggggaccaatatgcagacctcttcctggccgcaaagaatctgtcagatgcaatcctcttgtccgacatactgagagttaacactgagatcacaaaggcacctctgtccgcctccatgattaagagatacgatgagcatcaccaggatctgactttgctcaaagccctcgttagacagcagttgccagaaaagtacaaagaaatattctttgatcaatcaaaaaacggatatgcagggtacatcgacggtggggcaagccaggaagagttctacaaattcatcaaacctatcctggaaaagatggatgggacagaagagctgctggttaagctgaatagggaagacctcctcagaaagcagaggacatttgataacgggagcatccctcatcaaatccacctcggtgaactccatgctatcctgagaaggcaggaagacttttatccatttttgaaggacaatagggagaaaatcgaaaaaatcctgacattcagaatcccatactacgttggtcctctggcaagaggtaacagtaggttcgcatggatgacaaggaaaagcgaggagacaatcacaccctggaattttgaggaagttgttgacaagggtgccagcgcacaatcctttatcgaaagaatgacaaatttcgacaagaatctgcctaacgaaaaggttctcccaaagcattcactcctgtacgaatattttacagtttataacgaactgactaaagttaaatacgttaccgagggtatgaggaagccagcattcctttccggggaacagaagaaagctattgtggacctcctgttcaagacaaatagaaaagtgacagttaagcaactcaaagaggattacttcaaaaagatcgaatgttttgactctgtggagatcagcggggtggaggatagattcaacgccagcctgggtacatatcatgatctcctgaaaatcattaaagacaaggacttccttgacaacgaggagaacgaggacattctggaagacattgttctgaccctcacactctttgaggatagggagatgattgaggaaagactgaagacctacgcccacctctttgacgataaagtgatgaaacagctcaagagaagaaggtatacaggttgggggagactgagcaggaagttgatcaatgggattagggacaaacagtccgggaaaacaatcctcgattttctgaagtcagacggtttcgcaaacagaaattttatgcagctcattcacgatgacagcttgacattcaaggaagacatccaaaaggctcaagtgagcggccaaggggatagcctccacgagcatattgcaaatctggcaggttcaccagccatcaaaaagggcatacttcagacagttaaggttgtggacgaattggttaaagttatgggcaggcataagccagagaatatcgttatcgaaatggcaagggagaaccaaacaactcaaaaagggcagaaaaatagcagagagaggatgaaaagaatcgaggaagggatcaaggaacttgggtcccaaatcctcaaggagcacccagttgaaaatactcaactgcaaaacgagaagctctatctctactatctccaaaacgggagggatatgtatgttgaccaggagctggatattaacagactgtcagattatgatgttgatcatatcgtgccccagtcattcctgaaggacgattccatcgacaacaaagttctcacaaggtccgataaaaacaggggcaagtccgataacgttccaagcgaagaagtggtgaaaaagatgaaaaactattggagacaacttctgaatgcaaagttgattactcagagaaagtttgacaacctcacaaaagcagaaagaggcgggcttagcgaactcgataaggcagggtttatcaaaagacagctggttgagacaaggcagatcacaaaacatgtggcacagatccttgactcaaggatgaataccaagtatgatgagaatgataagttgatcagggaggttaaagttatcacactcaaatccaaactggtgtcagacttcaggaaagactttcaattttataaggtgagggagatcaataactaccaccatgcacatgacgcctacctgaacgcagtggtgggtacagcattgattaaaaaataccctaagctggagtctgagtttgtgtacggggactacaaggtgtacgacgtgaggaaaatgatagccaagtccgagcaggagatcgggaaagcaacagctaagtatttcttttacagtaatatcatgaatttctttaaaactgagattactctggcaaacggggagatcaggaaaagacccctcatcgagactaatggtgaaacaggtgagatcgtttgggacaaggggagggattttgctactgttagaaaagttctgagtatgccacaagtgaatattgtgaaaaagacagaagttcagacaggtgggttctccaaagaatccatcctgcccaagagaaattcagacaagctcatcgcaagaaagaaggactgggaccctaagaagtacggaggatttgacagccccaccgtggcctattccgtgcttgttgtggcaaaggtggagaaagggaagagcaaaaaactgaaatccgtgaaagaactgctgggaattaccatcatggaaagaagctcctttgagaagaacccaatcgacttcctggaagcaaaaggatataaggaagtgaaaaaggacctcattatcaagctcccaaaatactcacttttcgagttggagaacggtagaaagaggatgctggcaagcgcaggggaacttcagaaaggcaatgagctggcattgccatcaaagtatgtgaacttcctctacttggccagccattacgagaaacttaaaggtagcccagaagataacgagcaaaaacagctctttgtggaacagcataagcattatctggatgagatcatagaacaaatctcagagttttccaagagagttatcctcgcagatgcaaacctggataaggttctctcagcctataataagcatagagacaagccaattagagagcaagcagagaacattatccacttgttcactcttacaaacctgggggcaccagccgccttcaaatatttcgatacaacaatagacagaaagaggtataccagcaccaaagaagttctcgacgccacactgatccatcaatcaatcacaggcctttacgaaactaggatcgacttgtcacaactgggtggggat

SEQ ID NO: 11 - DNA, 3307 bp, synthetic construct
  misc_feature 1..3307: note = Cas9 nt sequence
  source 1..3307: mol_type = other DNA
gagcaaggacacctacgacgacgacttggacaacctattggcccagataggtgaccagtatgcagacctcttccttgcggccaagaacttgagtgacgctatactgctcagtgacatcctgagggtgaacactgagatcactaaggcccctctctctgcctcaatgattaagcgttacgacgagcatcaccaggatctcaccctgcttaaggcccttgttcggcagcagctccctgagaagtacaaggagatattttttgaccagtctaagaacggctacgccggttacattgacggtggggcaagccaggaggagttctacaagttcatcaagccgatccttgagaagatggacggcaccgaggagctacttgtcaagttgaaccgggaagacctgctccggaaacagcgtacattcgacaacggcagcatccctcaccagatccacctgggcgaactacacgccatcctccgacgtcaggaggacttctatccattcttgaaagataacagggaaaaaatcgaaaaaatacttacgtttcgaataccttactacgtggggccccttgctcggggaaactccagattcgcatggatgaccaggaagtcagaggagaccatcacaccctggaactttgaggaggtggttgacaaaggtgcttctgcccagtccttcattgagcggatgactaacttcgacaagaacctgcccaacgagaaggtgctgccaaagcacagcctgctctacgaatactttactgtgtacaatgagctgacgaaggtgaagtacgtgacagaggggatgcggaagcccgctttcctgagcggcgagcaaaaaaaagcaatcgtggacctactgttcaagaccaaccgaaaggtgacagtgaagcagctcaaggaggactacttcaaaaaaatcgagtgcttcgactctgttgagataagcggcgtggaggaccgattcaacgcctcattgggaacctatcacgacctgctcaagatcattaaggacaaggacttcctggataatgaggagaatgaggacatcctggaggatattgtgctgacccttactctattcgaggacagggagatgatcgaggagcgactcaagacctacgctcacctgttcgacgacaaggttatgaagcaattgaagcgtaggcgatacacggggtggggaagactctcccgaaaactgataaacggcatcagggacaagcagtcagggaagacgatcttggacttcctgaaatccgacgggttcgccaaccgcaacttcatgcagctcattcacgacgactcactaacgttcaaagaggacattcagaaggctcaagtcagtggacaaggcgactccctgcacgagcacattgcaaaccttgcgggctccccggcgattaaaaagggcattctccaaacggttaaggtggtggacgagctggtgaaggtgatgggccgacacaagcctgagaacatcgtgatcgagatggccagggagaaccagactacccagaagggtcagaagaactctcgggaacgtatgaagcgtattgaggaggggattaaggagttgggctctcaaatcctcaaggagcaccctgtggagaacactcagctccaaaacgagaagctgtacctgtactacctgcaaaacgggcgcgatatgtacgtggatcaggagttggacatcaacaggcttagcgattacgacgtggaccacatcgtgccacagtcattcttaaaggacgacagcatcgacaacaaggttctgacgaggagcgacaagaatcgagggaaaagtgacaatgttccatccgaggaggtggtcaagaaaatgaagaactattggcgtcagcttctgaacgccaagctcatcacccagcggaaattcgacaacctgactaaggctgagcgaggcggactctccgagcttgacaaggctggcttcatcaagcggcagttggtcgaaacccgacagataacgaagcacgttgcccagatacttgactcccgtatgaacaccaagtacgacgagaacgacaagctcatcagggaggtgaaggtcattacccttaagtccaaactcgtcagcgactttcgtaaggacttccagttctacaaggtgcgcgagatcaataactaccaccacgcacacgacgcctacctgaacgcagtggttggaaccgcgttgattaaaaagtaccccaagttggagtcggagttcgtttacggggactacaaggtgtacgacgttcggaagatgatcgccaagtctgaacaggagatcgggaaagcaaccgccaagtatttcttctatagcaacatcatgaacttctttaaaaccgagatcacacttgccaatggcgagatccgtaagaggccgctgatcgagacaaatggggagactggcgagatcgtgtgggacaagggccgcgacttcgcaaccgttcggaaagtcttgtccatgcctcaagtcaacatcgtcaagaagactgaggtgcaaacaggcgggttctcgaaggagtccatactgcccaagaggaactcagacaagctcatagcacgcaaaaaagactgggatccaaagaaatacggcgggttcgactcgccgacagtcgcatactccgtgttagtggtggctaaagtggaaaaggggaagtccaagaagctcaagtccgtcaaggagttgctcgggatcaccattatggaacggtcctcattcgagaagaatcccattgacttcctagaggcgaagggctacaaagaggtcaaaaaggacctaattattaagctccccaagtattcactcttcgaacttgaaaatggtcgtaagcggatgttggcaagcgctggagagcttcagaaggggaacgagcttgcactgccttccaagtacgtgaacttcctgtacctcgcctctcattacgagaagttgaagggctcaccggaggacaacgagcagaagcagttgttcgtggagcagcacaagcactacctcgacgagatcattgagcagataagtgagttcagcaaacgggtgatccttgccgacgctaacctggacaaggtgctgagcgcctacaacaagcacagagacaagccgatccgagagcaagcggagaacatcatacacctgttcaccctcacgaacctcggggctcccgcagccttcaaatattttgacacgaccatcgaccgtaaacgctacactagcacgaaggaggtgctggacgctacccttatccaccagtccatcaccggcctgtacgagacgagaatcgacttgtcgcagctcggtggtgac

SEQ ID NO: 12 - DNA, 4101 bp, synthetic construct
  misc_feature 1..4101: note = Cas9 nt sequence
  source 1..4101: mol_type = other DNA
gacaaaaaatactcaattggtctggcaattgggaccaacagtgtcggatgggccgtgattaccgacgagtacaaggtgccgtccaaaaaattcaaggtgcttgggaacaccgaccgccactcgatcaagaaaaacctaatcggtgcgttgcttttcgacagtggggagaccgccgaggcaacacgcttaaaacgcacagctaggaggagatatacacggcgcaagaaccgaatatgctacttacaggagatattctccaatgagatggcgaaggtggacgactctttcttccatcggcttgaggaatccttcctggtcgaggaggacaagaagcacgagcgacacccgatattcgggaacatcgttgatgaggtggcgtaccacgagaagtacccaacgatataccacttacgcaagaagctcgtggactctacggacaaggccgacttgcgccttatctacttggcactggcccacatgattaagttccgaggccacttccttatcgagggtgacctgaaccccgataactccgacgtggacaagctcttcatccaactcgtccagacatacaaccagctattcgaggagaatcctatcaacgcctctggggtggacgctaaagctatcctctcagcccgcctgtcaaagtcgaggaggttggagaacctaatcgcccagcttccaggcgagaagaaaaatgggctgttcggaaaccttatcgcactctcactgggcctaaccccgaacttcaagtccaacttcgacctggcagaggacgcgaaattgcagttgtcgaaagacacctatgacgatgacctggacaacctgttggcccagataggggaccagtacgccgacctgttcctagcggccaagaacctgtccgacgccatcttgctgtcggatatactgcgggtgaacaccgagatcactaaagcacctctctccgccagcatgattaagcgttacgacgagcaccaccaagatttgaccctgctaaaggcacttgtacggcagcagcttcccgagaagtacaaggagatctttttcgaccaaagcaagaacggctacgccgggtacatcgacggaggtgccagccaggaggagttctacaagttcattaagcccatcctggagaagatggacgggactgaggaactacttgtgaagctgaaccgggaagacttactacggaagcagcgtaccttcgacaacggttctatcccacatcagatccatcttggggagttgcacgcgatcctgcgacgccaggaggacttttaccccttcctgaaagacaaccgcgagaaaatcgagaagatactgaccttcagaataccttactacgtcggaccccttgcgcgaggcaactcaagattcgcgtggatgaccaggaaatcagaggagaccatcacaccctggaatttcgaggaggtggttgacaagggtgcctccgcccagtcctttatcgaacgaatgaccaacttcgacaagaacttgcccaacgagaaggtgctccccaaacacagcctcctctacgaatatttcacagtgtacaacgagcttactaaagttaagtatgttactgagggcatgaggaaacccgccttcctgtcaggcgagcagaagaaagctattgtggacctccttttcaagaccaaccggaaggtgacagtgaagcagctcaaggaggactacttcaagaagatagagtgcttcgacagcgtggagatcagcggggtggaggacagattcaatgcctctctcggaacataccacgacttgcttaagatcatcaaggacaaggacttcctcgacaacgaggaaaacgaggatattctggaggatattgttctgactcttaccctgttcgaggaccgggagatgatcgaggagcgtctcaagacctacgcccacctgttcgacgacaaagttatgaagcagctcaagcgtcggagatataccggatggggccgtctgtctcggaagctcatcaacgggatcagggacaagcagtcagggaagacgatcttagacttccttaagtctgacggcttcgccaacaggaacttcatgcagttgatccacgacgacagccttaccttcaaggaggacatccagaaggcccaagtgagtggccagggtgacagcctccacgagcatattgctaatcttgcgggttccccagcgattaaaaagggcatacttcaaaccgttaaggtggtggacgagcttgtcaaggtgatggggcgacacaagcccgagaacatcgtgatcgagatggccagggagaaccagaccacccagaaggggcagaagaatagccgagaacgcatgaagcgcatcgaggaggggattaaggagctagggagccagatcctcaaggaacatcccgtcgagaacacccagctccagaacgagaagctatacctctactacttgcaaaacgggagggatatgtacgtggatcaggagttggacattaaccgcctaagcgactacgacgtagatcacatcgtgcctcagtcattcctcaaagacgacagcattgacaacaaagtcttgacccgatccgacaagaaccgaggaaaatccgacaatgtgccctcagaggaggtcgtcaagaaaatgaagaactattggaggcagctacttaacgccaaactcataacccagcggaagttcgacaacctgacaaaggctgagcggggtgggctcagcgagcttgacaaggctggcttcatcaagcggcagttggtggagacaagacagataacgaagcacgtggctcagatcctggactctcgcatgaacacgaagtacgacgagaacgacaaattgatccgcgaggtcaaggttattacgctcaagagcaaacttgtcagcgatttccgcaaggacttccagttctacaaggtgagggagattaacaactaccaccatgcacatgatgcctacttgaacgcagtggtggggaccgcgcttattaaaaagtaccctaagttggagtcagagttcgtttatggggactacaaggtgtacgacgtccggaagatgattgcaaagtctgaacaggaaatcgggaaggccaccgccaaatatttcttctacagtaacattatgaatttttttaagactgaaattactctcgcaaacggcgagatcaggaagcgtcccctcatcgagacaaacggggagaccggggagatagtctgggacaaggggcgggacttcgctacggtgaggaaggtgctctcgatgccacaagtgaacatcgtcaaaaagacagaggtgcagaccggtggcttctcaaaggagtcaatcctgccaaaacgtaacagcgacaagctcatcgcccgcaagaaagactgggaccctaagaagtatggtgggttcgactcaccgacggtcgcatactccgttctggtcgtggcaaaggtggaaaagggcaagtccaaaaaactgaaatccgtgaaggagttgcttggcattaccatcatggaacgcagcagcttcgagaagaaccccattgacttcctggaggctaaagggtacaaggaggtcaagaaagatttaattattaagctacctaagtacagcttgttcgagctggagaacggccgaaaacgaatgctcgcatccgccggggaacttcaaaagggcaacgagcttgcgctgccctccaagtacgtgaacttcctgtacttggcatcccactacgagaaactcaagggtagcccagaggacaacgagcagaagcagctattcgtggagcagcacaagcactacctcgacgagataatcgagcagatcagtgagttcagtaagcgggtgatactcgcggacgccaacttggacaaggtgcttagtgcctacaacaagcaccgtgacaagcccatccgagaacaggctgagaacatcatccaccttttcactctgacaaacctcggtgctcccgccgccttcaaatacttcgacactaccatcgacaggaagcgctacacatctacgaaggaagttcttgacgctacgcttattcatcagtctatcacagggctgtacgagacaaggatcgaccttagccaactcggcggggat

SEQ ID NO: 13 - DNA, 4101 bp, synthetic construct
  misc_feature 1..4101: note = Cas9 nt sequence
  source 1..4101: mol_type = other DNA
gacaagaagtacagcatcgggctggcgatcgggaccaactccgtcggctgggctgtgattaccgacgagtacaaggtgccatccaagaagttcaaggtcctcggcaacactgaccggcacagcattaagaagaacctgattggggcgctgctgttcgattcgggggagactgcggaggcgaccaggctgaagcggactgcgcgccggaggtacaccaggaggaagaatcggatctgctacctccaggagattttctcgaatgagatggccaaggtggacgattccttcttccatcgcctggaggagtcgttcctcgttgaggaggacaagaagcatgagaggcatcccattttcgggaatatcgttgacgaggtggcttaccatgagaagtacccgaccatctaccatctgcggaagaagctcgtcgattcgaccgataaggccgacctgcggctgatctacctggccctcgcgcacatgattaagttccggggccatttcctcatcgagggcgacctcaacccggacaactcggacgtggataagctcttcattcagctcgtgcagacatacaaccagctcttcgaggagaatcccattaacgcctcgggggtcgacgctaaggctattctctcggctcggctgtcgaagtcgcgccggctggagaatctcattgcccagctcccaggcgagaagaagaacggcctcttcggcaacctgattgccctgtcgctggggctcacaccgaatttcaagtcgaacttcgacctcgccgaggacgctaagctccagctcagcaaggatacttacgatgatgacctcgataacctgctcgcccagattggggatcagtacgcggatctgttcctcgcggccaagaatctcagcgatgctattctcctgtcggacattctccgcgtcaacacagagattactaaggccccactgtcggcgagcatgattaagaggtacgatgagcatcatcaggacctgacactgctcaaggcgctggtccggcagcagctccccgagaagtacaaggagattttcttcgatcagtcaaagaatgggtacgcgggctacattgatggcggcgcgtcccaggaggagttctacaagttcattaagcccatcctggagaagatggacgggaccgaggagctgctggtgaagctcaatcgggaggacctgctccggaagcagcgcacattcgacaatggctcgattcctcaccagattcacctgggcgagctgcacgccattctccgcaggcaggaggacttctacccgttcctcaaggacaaccgcgagaagatcgagaagatcctgaccttccggattccatactacgtggggccgctcgcgcgggggaactcccggttcgcgtggatgactcgcaagtccgaagaaacgattacaccgtggaatttcgaggaggtcgtcgacaagggcgctagtgcgcagtcattcattgagaggatgaccaatttcgataagaacctgcctaacgagaaggtgctgccgaagcattcgctgctctacgagtacttcaccgtttacaatgagctgaccaaggtgaagtatgtgactgagggcatgaggaagccagcgttcctgagcggcgagcagaagaaggctatcgtggacctgctcttcaagactaaccggaaggtgactgtgaagcagctcaaggaggactacttcaagaagattgagtgcttcgattccgttgagattagcggggtggaggatcggttcaatgcttcgctcgggacataccacgatctcctgaagatcattaaggataaggacttcctcgacaacgaggagaacgaggacattctcgaagatattgtcctgaccctcaccctcttcgaggatcgggagatgatcgaggagaggctcaagacatacgctcatctgttcgatgataaggtcatgaagcagctgaagcgcaggcggtacacagggtgggggcggctgagccggaagctgatcaacgggattcgggataagcagtccgggaagacaattctcgacttcctcaagtccgacgggttcgctaaccggaacttcatgcagctcattcatgatgactcgctgacattcaaggaggatattcagaaggcgcaggtttcggggcagggcgactcgctccacgagcatattgcgaatctggcgggctcccccgcgattaagaagggcattctgcaaaccgtcaaggtggttgatgagctggtcaaggtcatggggcggcataagccagagaatattgtcatcgagatggcgcgggagaatcagaccacacagaaggggcagaagaactcacgggagcggatgaagcgcatcgaggagggcatcaaggagctggggtcgcagatcctgaaggagcatcccgtggagaacactcagctgcaaaatgagaagctgtacctctactacctccagaacgggagggacatgtatgtggatcaggagctggatattaataggctgagcgattacgatgtcgaccacattgtcccacagtcgttcctgaaggacgacagcattgacaacaaggtgctgacccgctcggataagaacaggggcaagagcgataatgttccaagcgaggaggttgtgaagaagatgaagaactactggcggcagctcctgaacgcgaagctcatcacacagcggaagttcgacaacctcaccaaggctgagcgcgggggcctgagcgagctggacaaggcggggttcattaagaggcagctggtcgagacacggcagattacaaagcatgttgcgcagattctcgattcccggatgaacaccaagtacgatgagaacgataagctgattcgggaggtcaaggtaattaccctgaagtccaagctggtgtccgacttcaggaaggacttccagttctacaaggttcgggagatcaacaactaccaccacgcgcatgatgcctacctcaacgcggtcgtggggaccgctctcatcaagaagtacccaaagctggagtcagagttcgtctacggggattacaaggtttacgacgtgcggaagatgatcgctaagagcgagcaggagattggcaaggctaccgctaagtacttcttctactccaacatcatgaacttcttcaagacagagattaccctcgcgaatggcgagatccggaagaggcccctcatcgagacaaatggggagacaggggagattgtctgggataaggggcgggatttcgcgaccgtccggaaggtcctgtcgatgccccaggttaatattgtcaagaagactgaggtccagactggcggcttctcaaaggagtcgattctcccaaagaggaactccgataagctcattgctcggaagaaggattgggaccccaagaagtacgggggattcgactcccccactgttgcttactctgttctggttgttgctaaggtggagaaggggaagtcgaagaagctgaagagcgtgaaggagctgctcgggattacaattatggagaggtcatccttcgagaagaatcccatcgacttcctggaggccaagggctacaaggaggtgaagaaggacctgattattaagctgcccaagtactcgctcttcgagctggagaatgggcggaagcggatgctggcgtccgcgggggagctgcaaaaggggaacgagctggcgctcccctccaagtatgtgaacttcctctacctggcgtcgcactacgagaagctgaaggggtccccagaggataatgagcagaagcagctcttcgtcgagcagcataagcactacctggacgagattatcgagcagattagcgagttctcgaagcgggtcatcctcgcggatgcgaacctggataaggtgctcagcgcctacaataagcaccgggacaagccgattcgggagcaggcggagaatattattcacctcttcacactcaccaacctcggggcaccagctgcgttcaagtacttcgacactactatcgaccggaagcggtacacctcgacgaaggaggtgctcgacgccaccctcattcaccagtcgatcacaggcctgtacgagacacggattgacctgtcccagctcgggggcgac

SEQ ID NO: 14 - protein, 1367 aa, synthetic construct
  REGION 1..1367: note = nCas9
DKKYSIGLAIGTNSVGWAVITDEYKVPSKKFKVLGNTDRHSIKKNLIGALLFDSGETAEATRLKRTARRRYTRRKNRICYLQEIFSNEMAKVDDSFFHRLEESFLVEEDKKHERHPIFGNIVDEVAYHEKYPTIYHLRKKLVDSTDKADLRLIYLALAHMIKFRGHFLIEGDLNPDNSDVDKLFIQLVQTYNQLFEENPINASGVDAKAILSARLSKSRRLENLIAQLPGEKKNGLFGNLIALSLGLTPNFKSNFDLAEDAKLQLSKDTYDDDLDNLLAQIGDQYADLFLAAKNLSDAILLSDILRVNTEITKAPLSASMIKRYDEHHQDLTLLKALVRQQLPEKYKEIFFDQSKNGYAGYIDGGASQEEFYKFIKPILEKMDGTEELLVKLNREDLLRKQRTFDNGSIPHQIHLGELHAILRRQEDFYPFLKDNREKIEKILTFRIPYYVGPLARGNSRFAWMTRKSEETITPWNFEEVVDKGASAQSFIERMTNFDKNLPNEKVLPKHSLLYEYFTVYNELTKVKYVTEGMRKPAFLSGEQKKAIVDLLFKTNRKVTVKQLKEDYFKKIECFDSVEISGVEDRFNASLGTYHDLLKIIKDKDFLDNEENEDILEDIVLTLTLFEDREMIEERLKTYAHLFDDKVMKQLKRRRYTGWGRLSRKLINGIRDKQSGKTILDFLKSDGFANRNFMQLIHDDSLTFKEDIQKAQVSGQGDSLHEHIANLAGSPAIKKGILQTVKVVDELVKVMGRHKPENIVIEMARENQTTQKGQKNSRERMKRIEEGIKELGSQILKEHPVENTQLQNEKLYLYYLQNGRDMYVDQELDINRLSDYDVDHIVPQSFLKDDSIDNKVLTRSDKNRGKSDNVPSEEVVKKMKNYWRQLLNAKLITQRKFDNLTKAERGGLSELDKAGFIKRQLVETRQITKHVAQILDSRMNTKYDENDKLIREVKVITLKSKLVSDFRKDFQFYKVREINNYHHAHDAYLNAVVGTALIKKYPKLESEFVYGDYKVYDVRKMIAKSEQEIGKATAKYFFYSNIMNFFKTEITLANGEIRKRPLIETNGETGEIVWDKGRDFATVRKVLSMPQVNIVKKTEVQTGGFSKESILPKRNSDKLIARKKDWDPKKYGGFDSPTVAYSVLVVAKVEKGKSKKLKSVKELLGITIMERSSFEKNPIDFLEAKGYKEVKKDLIIKLPKYSLFELENGRKRMLASAGELQKGNELALPSKYVNFLYLASHYEKLKGSPEDNEQKQLFVEQHKHYLDEIIEQISEFSKRVILADANLDKVLSAYNKHRDKPIREQAENIIHLFTLTNLGAPAAFKYFDTTIDRKRYTSTKEVLDATLIHQSITGLYETRIDLSQLGGD

SEQ ID NO: 15 - protein, 1367 aa, synthetic construct
  REGION 1..1367: note = enCas9
DKKYSIGLAIGTNSVGWAVITDEYKVPSKKFKVLGNTDRHSIKKNLIGALLFDSGETAEATRLKRTARRRYTRRKNRICYLQEIFSNEMAKVDDSFFHRLEESFLVEEDKKHERHPIFGNIVDEVAYHEKYPTIYHLRKKLVDSTDKADLRLIYLALAHMIKFRGHFLIEGDLNPDNSDVDKLFIQLVQTYNQLFEENPINASGVDAKAILSARLSKSRRLENLIAQLPGEKKNGLFGNLIALSLGLTPNFKSNFDLAEDAKLQLSKDTYDDDLDNLLAQIGDQYADLFLAAKNLSDAILLSDILRVNTEITKAPLSASMIKRYDEHHQDLTLLKALVRQQLPEKYKEIFFDQSKNGYAGYIDGGASQEEFYKFIKPILEKMDGTEELLVKLNREDLLRKQRTFDNGSIPHQIHLGELHAILRRQEDFYPFLKDNREKIEKILTFRIPYYVGPLARGNSRFAWMTRKSEETITPWNFEEVVDKGASAQSFIERMTNFDKNLPNEKVLPKHSLLYEYFTVYNELTKVKYVTEGMRKPAFLSGEQKKAIVDLLFKTNRKVTVKQLKEDYFKKIECFDSVEISGVEDRFNASLGTYHDLLKIIKDKDFLDNEENEDILEDIVLTLTLFEDREMIEERLKTYAHLFDDKVMKQLKRRRYTGWGRLSRKLINGIRDKQSGKTILDFLKSDGFANRNFMQLIHDDSLTFKEDIQKAQVSGQGDSLHEHIANLAGSPAIKKGILQTVKVVDELVKVMGRHKPENIVIEMARENQTTQKGQKNSRERMKRIEEGIKELGSQILKEHPVENTQLQNEKLYLYYLQNGRDMYVDQELDINRLSDYDVDHIVPQSFLADDSIDNKVLTRSDKNRGKSDNVPSEEVVKKMKNYWRQLLNAKLITQRKFDNLTKAERGGLSELDKAGFIKRQLVETRQITKHVAQILDSRMNTKYDENDKLIREVKVITLKSKLVSDFRKDFQFYKVREINNYHHAHDAYLNAVVGTALIKKYPALESEFVYGDYKVYDVRKMIAKSEQEIGKATAKYFFYSNIMNFFKTEITLANGEIRKAPLIETNGETGEIVWDKGRDFATVRKVLSMPQVNIVKKTEVQTGGFSKESILPKRNSDKLIARKKDWDPKKYGGFDSPTVAYSVLVVAKVEKGKSKKLKSVKELLGITIMERSSFEKNPIDFLEAKGYKEVKKDLIIKLPKYSLFELENGRKRMLASAGELQKGNELALPSKYVNFLYLASHYEKLKGSPEDNEQKQLFVEQHKHYLDEIIEQISEFSKRVILADANLDKVLSAYNKHRDKPIREQAENIIHLFTLTNLGAPAAFKYFDTTIDRKRYTSTKEVLDATLIHQSITGLYETRIDLSQLGGD

SEQ ID NO: 16 - protein, 1228 aa, unidentified
  REGION 1..1228: note = Lachnospiraceae bacterium
MSKLEKFTNCYSLSKTLRFKAIPVGKTQENIDNKRLLVEDEKRAEDYKGVKKLLDRYYLSFINDVLHSIKLKNLNNYISLFRKKTRTEKENKELENLEINLRKEIAKAFKGNEGYKSLFKKDIIETILPEFLDDKDEIALVNSFNGFTTAFTGFFDNRENMFSEEAKSTSIAFRCINENLTRYISNMDIFEKVDAIFDKHEVQEIKEKILNSDYDVEDFFEGEFFNFVLTQEGIDVYNAIIGGFVTESGEKIKGLNEYINLYNQKTKQKLPKFKPLYKQVLSDRESLSFYGEGYTSDEEVLEVFRNTLNKNSEIFSSIKKLEKLFKNFDEYSSAGIFVKNGPAISTISKDIFGEWNVIRDKWNAEYDDIHLKKKAVVTEKYEDDRRKSFKKIGSFSLEQLQEYADADLSVVEKLKEIIIQKVDEIYKVYGSSEKLFDADFVLEKSLKKNDAVVAIMKDLLDSVKSFENYIKAFFGEGKETNRDESFYGDFVLAYDILLKVDHIYDAIRNYVTQKPYSKDKFKLYFQNPQFMGGWDKDKETDYRATILRYGSKYYLAIMDKKYAKCLQKIDKDDVNGNYEKINYKLLPGPNKMLPKVFFSKKWMAYYNPSEDIQKIYKNGTFKKGDMFNLNDCHKLIDFFKDSISRYPKWSNAYDFNFSETEKYKDIAGFYREVEEQGYKVSFESASKKEVDKLVEEGKLYMFQIYNKDFSDKSHGTPNLHTMYFKLLFDENNHGQIRLSGGAELFMRRASLKKEELVVHPANSPIANKNPDNPKKTTTLSYDVYKDKRFSEDQYELHIPIAINKCPKNIFKINTEVRVLLKHDDNPYVIGIARGERNLLYIVVVDGKGNIVEQYSLNEIINNFNGIRIKTDYHSLLDKKEKERFEARQNWTSIENIKELKAGYISQVVHKICELVEKYDAVIALEDLNSGFKNSRVKVEKQVYQKFEKMLIDKLNYMVDKKSNPCATGGALKGYQITNKFESFKSMSTQNGFIFYIPAWLTSKIDPSTGFVNLLKTKYTSIADSKKFISSFDRIMYVPEEDLFEFALDYKNFSRTDADYIKKWKLYSYGNRIRIFRNPKKNNVFDWEEVCLTSAYKELFNKYGINYQQGDIRALLCEQSDKAFYSSFMALMSLMLQMRNSITGRTDVDFLISPVKNSDGIFYDSRNYEAQENAILPKNADANGAYNIARKVLWAIGQFKKAEDEKLDKVKIAISNKEWLEYAQTSVKH

SEQ ID NO: 17 - protein, 1307 aa, Acidaminococcus sp.
MTQFEGFTNLYQVSKTLRFELIPQGKTLKHIQEQGFIEEDKARNDHYKELKPIIDRIYKTYADQCLQLVQLDWENLSAAIDSYRKEKTEETRNALIEEQATYRNAIHDYFIGRTDNLTDAINKRHAEIYKGLFKAELFNGKVLKQLGTVTTTEHENALLRSFDKFTTYFSGFYENRKNVFSAEDISTAIPHRIVQDNFPKFKENCHIFTRLITAVPSLREHFENVKKAIGIFVSTSIEEVFSFPFYNQLLTQTQIDLYNQLLGGISREAGTEKIKGLNEVLNLAIQKNDETAHIIASLPHRFIPLFKQILSDRNTLSFILEEFKSDEEVIQSFCKYKTLLRNENVLETAEALFNELNSIDLTHIFISHKKLETISSALCDHWDTLRNALYERRISELTGKITKSAKEKVQRSLKHEDINLQEIISAAGKELSEAFKQKTSEILSHAHAALDQPLPTTLKKQEEKEILKSQLDSLLGLYHLLDWFAVDESNEVDPEFSARLTGIKLEMEPSLSFYNKARNYATKKPYSVEKFKLNFQMPTLASGWDVNKEKNNGAILFVKNGLYYLGIMPKQKGRYKALSFEPTEKTSEGFDKMYYDYFPDAAKMIPKCSTQLKAVTAHFQTHTTPILLSNNFIEPLEITKEIYDLNNPEKEPKKFQTAYAKKTGDQKGYREALCKWIDFTRDFLSKYTKTTSIDLSSLRPSSQYKDLGEYYAELNPLLYHISFQRIAEKEIMDAVETGKLYLFQIYNKDFAKGHHGKPNLHTLYWTGLFSPENLAKTSIKLNGQAELFYRPKSRMKRMAHRLGEKMLNKKLKDQKTPIPDTLYQELYDYVNHRLSHDLSDEARALLPNVITKEVSHEIIKDRRFTSDKFFFHVPITLNYQAANSPSKFNQRVNAYLKEHPETPIIGIDRGERNLIYITVIDSTGKILEQRSLNTIQQFDYQKKLDNREKERVAARQAWSVVGTIKDLKQGYLSQVIHEIVDLMIHYQAVVVLENLNFGFKSKRTGIAEKAVYQQFEKMLIDKLNCLVLKDYPAEKVGGVLNPYQLTDQFTSFAKMGTQSGFLFYVPAPYTSKIDPLTGFVDPFVWKTIKNHESRKHFLEGFDFLHYDVKTGDFILHFKMNRNLSFQRGLPGFMPAWDIVFEKNETQFDAKGTPFIAGKRIVPVIENHRFTGRYRDLYPANELIALLEEKGIVFRDGSNILPKLLENDDSHAIDTMVALIRSVLQMRNSNAATGEDYINSPVRDLNGVCFDSRFQNPEWPMDADANGAYHIALKGQLLLNHLKESKDLKLQNGISNQDWLAYIQELRN

SEQ ID NO: 18 - protein, 1241 aa, Butyrivibrio proteoclasticus
MLLYENYTKRNQITKSLRLELRPQGKTLRNIKELNLLEQDKAIYALLERLKPVIDEGIKDIARDTLKNCELSFEKLYEHFLSGDKKAYAKESERLKKEIVKTLIKNLPEGIGKISEINSAKYLNGVLYDFIDKTHKDSEEKQNILSDILETKGYLALFSKFLTSRITTLEQSMPKRVIENFEIYAANIPKMQDALERGAVSFAIEYESICSVDYYNQILSQEDIDSYNRLISGIMDEDGAKEKGINQTISEKNIKIKSEHLEEKPFRILKQLHKQILEEREKAFTIDHIDSDEEVVQVTKEAFEQTKEQWENIKKINGFYAKDPGDITLFIVVGPNQTHVLSQLIYGEHDRIRLLLEEYEKNTLEVLPRRTKSEDARYDKFVNAVPKKVAKESHTFDGLQKMTGDDRLFILYRDELARNYMRIKEAYGTFERDILKSRRGIKGNRDVQESLVSFYDELTKFRSALRIINSGNDEKADPIFYNTFDGIFEKANRTYKAENLCRNYVTKSPADDARIMASCLGTPARLRTHWWNGEENFAINDVAMIRRGDEYYYFVLTPDVKPVDLKTKDETDAQIFVQRKGAKSFLGLPKALFKCILEPYFESPEHKNDKNCVIEEYVSKPLTIDRRAYDIFKNGTFKKTNIGIDGLTEEKFKDDCRYLIDVYKEFIAVYTRYSCFNMSGLKRADEYNDIGEFFSDVDTRLCTMEWIPVSFERINDMVDKKEGLLFLVRSMFLYNRPRKPYERTFIQLFSDSNMEHTSMLLNSRAMIQYRAASLPRRVTHKKGSILVALRDSNGEHIPMHIREAIYKMKNNFDISSEDFIMAKAYLAEHDVAIKKANEDIIRNRRYTEDKFFLSLSYTKNADISARTLDYINDKVEEDTQDSRMAVIVTRNLKDLTYVAVVDEKNNVLEEKSLNEIDGVNYRELLKERTKIKYHDKTRLWQYDVSSKGLKEAYVELAVTQISKLATKYNAVVVVESMSSTFKDKFSFLDEQIFKAFEARLCARMSDLSFNTIKEGEAGSISNPIQVSNNNGNSYQDGVIYFLNNAYTRTLCPDTGFVDVFDKTRLITMQSKRQFFAKMKDIRIDDGEMLFTFNLEEYPTKRLLDRKEWTVKIAGDGSYFDKDKGEYVYVNDIVREQIIPALLEDKAVFDGNMAEKFLDKTAISGKSVELIYKWFANALYGIITKKDGEKIYRSPITGTEIDVSKNTTYNFGKKFMFKQEYRGDGDFLDAFLNYMQAQDIAV

SEQ ID NO: 19 - protein, 1238 aa, Methanoplasma termitum
MNNYDEFTKLYPIQKTIRFELKPQGRTMEHLETFNFFEEDRDRAEKYKILKEAIDEYHKKFIDEHLTNMSLDWNSLKQISEKYYKSREEKDKKVFLSEQKRMRQEIVSEFKKDDRFKDLFSKKLFSELLKEEIYKKGNHQEIDALKSFDKFSGYFIGLHENRKNMYSDGDEITAISNRIVNENFPKFLDNLQKYQEARKKYPEWIIKAESALVAHNIKMDIVFSLEYFNKVLNQEGIQRYNLALGGYVTKSGEKMMGLNDALNLAHQSEKSSKGRIHMTPLFKQILSEKESFSYIPDVFTEDSQLLPSIGGFFAQIENDKDGNIFDRALELISSYAEYDTERIYIRQADINRVSNVIFGEWGTLGGLMREYKADSINDINLERTCKKVDKWLDSKEFALSDVLEAIDRTGNNDAFNEYISKMRTAREKIDAARKEMKFISEKISGDEESIHIIKTLLDSVQQFLHFFNLFKARQDIPLDGAFYAEFDEVHSKLFAIVPLYNKVRNYLTKNNLNTKKIKLNFKNPTLANGWDQNKVYDYASLIFLRDGNYYLGIINPKRKKNIKFEQGSGNGPFYRKMVYKQIPGPNKNLRPVFLTSTKGKKEYKPSKEIIEGYEADKHIRGDKFDLDFCHKLIDFFKESIEKHKDWSKFNFYFSPTESYGDISEFYLDVEKQGYRMHFENISAETIDEYVEKGDLFLFQIYNKDFVKAATGKKDMHTIYWNAAFSPENLQDVVVKLNGEAELFYRDKSDIKEIVHREGEILVNRTYNGRTPVPDKIHKKLTDYHNGRTKDLGEAKEYLDKVRYFKAHYDITKDRRYLNDKIYFHVPLTLNFKANGKKNLNKMVIEKFLSDEKAHIIGIDRGERNLLYYSIIDRSGKIIDQQSLNVIDGFDYREKLNQREIEMKDARQSWNAIGKIKDLKEGYLSKAVHEITKMAIQYNAIVVMEELNYGFKRGRFKVEKQIYQKFENMLIDKMNYLVFKDAPDESPGGVLNAYQLTNPLESFAKLGKQTGILFYVPAAYTSKIDPTTGFVNLFNTSSKTNAQERKEFLQKFESISYSAKDGGIFAFAFDYRKFGTSKTDHKNVWTAYTNGERMRYIKEKKRNELFDPSKEIKEALTSSGIKYDGGQNILPDILRSNNNGLIYTMYSSFIAAIQMRVYDGKEDYIISPIKNSKGEFFRTDPKRRELPIDADANGAYNIALRGELTMRAIAEKFDPDSEKMAKLELKHKDWFEFMQTRGD

SEQ ID NO: 20 - protein, 1281 aa, Eubacterium eligens
MNGNRSIVYREFVGVIPVAKTLRNELRPVGHTQEHIIQNGLIQEDELRQEKSTELKNIMDDYYREYIDKSLSGVTDLDFTLLFELMNLVQSSPSKDNKKALEKEQSKMREQICTHLQSDSNYKNIFNAKLLKEILPDFIKNYNQYDVKDKAGKLETLALFNGFSTYFTDFFEKRKNVFTKEAVSTSIAYRIVHENSLIFLANMTSYKKISEKALDEIEVIEKNNQDKMGDWELNQIFNPDFYNMVLIQSGIDFYNEICGVVNAHMNLYCQQTKNNYNLFKMRKLHKQILAYTSTSFEVPKMFEDDMSVYNAVNAFIDETEKGNIIGKLKDIVNKYDELDEKRIYISKDFYETLSCFMSGNWNLITGCVENFYDENIHAKGKSKEEKVKKAVKEDKYKSINDVNDLVEKYIDEKERNEFKNSNAKQYIREISNIITDTETAHLEYDDHISLIESEEKADEMKKRLDMYMNMYHWAKAFIVDEVLDRDEMFYSDIDDIYNILENIVPLYNRVRNYVTQKPYNSKKIKLNFQSPTLANGWSQSKEFDNNAIILIRDNKYYLAIFNAKNKPDKKIIQGNSDKKNDNDYKKMVYNLLPGANKMLPKVFLSKKGIETFKPSDYIISGYNAHKHIKTSENFDISFCRDLIDYFKNSIEKHAEWRKYEFKFSATDSYSDISEFYREVEMQGYRIDWTYISEADINKLDEEGKIYLFQIYNKDFAENSTGKENLHTMYFKNIFSEENLDKIIKLNGQAELFYRRASVKNPVKHKKDSVLVNKTYKNQLDNGDVVRIPIPDDIYNEIYKMYNGYIKESDLSEAAKEYLDKVEVRTAQKDIVKDYRYTVDKYFIHTPITINYKVTARNNVNDMVVKYIAQNDDIHVIGIDRGERNLIYISVIDSHGNIVKQKSYNILNNYDYKKKLVEKEKTREYARKNWKSIGNIKELKEGYISGVVHEIAMLIVEYNAIIAMEDLNYGFKRGRFKVERQVYQKFESMLINKLNYFASKEKSVDEPGGLLKGYQLTYVPDNIKNLGKQCGVIFYVPAAFTSKIDPSTGFISAFNFKSISTNASRKQFFMQFDEIRYCAEKDMFSFGFDYNNFDTYNITMGKTQWTVYTNGERLQSEFNNARRTGKTKSINLTETIKLLLEDNEINYADGHDIRIDMEKMDEDKKSEFFAQLLSLYKLTVQMRNSYTEAEEQENGISYDKIISPVINDEGEFFDSDNYKESDDKECKMPKDADANGAYCIALKGLYEVLKIKSEWTEDGFDRNCLKLPHAEWLDFIQNKRYE

SEQ ID NO: 21 - protein, 1300 aa, Francisella tularensis
MSIYQEFVNKYSLSKTLRFELIPQGKTLENIKARGLILDDEKRAKDYKKAKQIIDKYHQFFIEEILSSVCISEDLLQNYSDVYFKLKKSDDDNLQKDFKSAKDTIKKQISEYIKDSEKFKNLFNQNLIDAKKGQESDLILWLKQSKDNGIELFKANSDITDIDEALEIIKSFKGWTTYFKGFHENRKVNYSSNDIPTSIIYRIVDDNLPKFLENKAKYESLKDKAPEAINYEQIKKDLAEELTFDIDYKTSEVNQRVFSLDEVFEIANFNNYLNQSGITKFNTIIGGKFVNGENTKRKGINEYINLYSQQINDKTLKKYKMSVLFKQILSDTESKSFVIDKLEDDSDVVTTMQSFYEQIAAFKTVEEKSIKETLSLLFDDLKAQKLDLSKIYFKNDKSLTDLSQQVFDDYSVIGTAVLEYITQQIAPKNLDNPSKKEQELIAKKTEKAKYLSLETIKLALEEFNKHRDIDKQCRFEEILANFAAIPMIFDEIAQNKDNLAQISIKYQNQGKKDLLQASAEDDVKAIKDLLDQTNNLLHKLKIFHISQSEDKANILDKDEHFYLVFEECYFELANIVPLYNKIRNYITQKPYSDEKFKLNFENSTLANGWDKNKEPDNTAILFIKDDKYYLGVMNKKNNKIFDDKAIKENKGEGYKKIVYKLLPGANKMLPKVFFSAKSIKFYNPSEDILRIRNHSTHTKNGSPQKGYEKFEFNIEDCRKFIDFYKQSISKHPEWKDFGFRFSDTQRYNSIDEFYREVENQGYKLTFENISESYIDSVVNQGKLYLFQIYNKDFSAYSKGRPNLHTLYWKALFDERNLQDVVYKLNGEAELFYRKQSIPKKITHPAKEAIANKNKDNPKKESVFEYDLIKDKRFTEDKFFFHCPITINFKSSGANKFNDEINLLLKEKANDVHILSIDRGERHLAYYTLVDGKGNIIKQDTFNIIGNDRMKTNYHDKLAAIEKDRDSARKDWKKINNIKEMKEGYLSQVVHEIAKLVIEYNAIVVFEDLNFGFKRGRFKVEKQVYQKLEKMLIEKLNYLVFKDNEFDKTGGVLRAYQLTAPFETFKKMGKQTGIIYYVPAGFTSKICPVTGFVNQLYPKYESVSKSQEFFSKFDKICYNLDKGYFEFSFDYKNFGDKAAKGKWTIASFGSRLINFRNSDKNHNWDTREVYPTKELEKLLKDYSIEYGHGECIKAAICGESDKKFFAKLTSVLNTILQMRNSKTGTELDYLISPVADVNGNFFDSRQAPKNMPQDADANGAYHIGLKGLMLLGRIKNNQEGKKLNLVIKNEEYFEFVQNRNN

SEQ ID NO: 22 - protein, 1206 aa, unidentified
  REGION 1..1206: note = Lachnospiraceae bacterium
MYYESLTKQYPVSKTIRNELIPIGKTLDNIRQNNILESDVKRKQNYEHVKGILDEYHKQLINEALDNCTLPSLKIAAEIYLKNQKEVSDREDFNKTQDLLRKEVVEKLKAHENFTKIGKKDILDLLEKLPSISEDDYNALESFRNFYTYFTSYNKVRENLYSDKEKSSTVAYRLINENFPKFLDNVKSYRFVKTAGILADGLGEEEQDSLFIVETFNKTLTQDGIDTYNSQVGKINSSINLYNQKNQKANGFRKIPKMKMLYKQILSDREESFIDEFQSDEVLIDNVESYGSVLIESLKSSKVSAFFDALRESKGKNVYVKNDLAKTAMSVIVFENWRTFDDLLNQEYDLANENKKKDDKYFEKRQKELKKNKSYSLEHLCNLSEDSCNLIENYIHQISDDIENIIINNETFLRIVINEHDRSRKLAKNRKAVKAIKDFLDSIKVLERELKLINSSGQELEKDLIVYSAHEELLVELKQVDSLYNMTRNYLTKKPFSTEKVKLNFNRSTLLNGWDRNKETDNLGVLLLKDGKYYLGIMNTSANKAFVNPPVAKTEKVFKKVDYKLLPVPNQMLPKVFFAKSNIDFYNPSSEIYSNYKKGTHKKGNMFSLEDCHNLIDFFKESISKHEDWSKFGFKFDTQASYNDISEFYREVEKQGYKLTYTDIDETYINDLIERNELYLFQIYNKDFSMYSKGKLNLHTLYFMMLFDQRNIDDVVYKLNGEAEVFYRPASISEDELIIHKAGEEIKNKNPNRARTKETSTFSYDIVKDKRYSKDKFTLHIPITMNFGVDEVKRFNDAVNSAIRIDENVNVIGIDRGERNLLYVVVIDSKGNILEQISLNSIINKEYDIETDYHALLDEREGGRDKARKDWNTVENIRDLKAGLYLQVVNVVAKLVLKYNAIICLEDLNFGFKRGRQKVEKQVYQKFEKMLIDKLNYLVIDKSREQTSPKELGGALNALQLTSKFKSFKELGKQSGVIYYVPAYLTSKIDPTTGFANLFYMKCENVEKSKRFFDGFDFIRFNALENVFEFGFDYRSFTQRACGINSKWTVCTNGERIIKYRNPDKNNMFDEKVVVVTDEMKNLFEQYKIPYEDGRNVKDMIISNEEAEFYRRLYRLLQQTLQMRNSTSDGTRDYIISPVKNKREAYFNSELSDGSVPKDADANGAYNIARKGLWVLEQIRQKSEGEKINLAMTNAEWLEYAQTHLL

SEQ ID NO: 23 - protein, 1233 aa, unidentified
  REGION 1..1233: note = Lachnospiraceae bacterium
MDYGNGQFERRAPLTKTITLRLKPIGETRETIREQKLLEQDAAFRKLVETVTPIVDDCIRKIADNALCHFGTEYDFSCLGNAISKNDSKAIKKETEKVEKLLAKVLTENLPDGLRKVNDINSAAFIQDTLTSFVQDDADKRVLIQELKGKTVLMQRFLTTRITALTVWLPDRVFENFNIFIENAEKMRILLDSPLNEKIMKFDPDAEQYASLEFYGQCLSQKDIDSYNLIISGIYADDEVKNPGINEIVKEYNQQIRGDKDESPLPKLKKLHKQILMPVEKAFFVRVLSNDSDARSILEKILKDTEMLPSKIIEAMKEADAGDIAVYGSRLHELSHVIYGDHGKLSQIIYDKESKRISELMETLSPKERKESKKRLEGLEEHIRKSTYTFDELNRYAEKNVMAAYIAAVEESCAEIMRKEKDLRTLLSKEDVKIRGNRHNTLIVKNYFNAWTVFRNLIRILRRKSEAEIDSDFYDVLDDSVEVLSLTYKGENLCRSYITKKIGSDLKPEIATYGSALRPNSRWWSPGEKFNVKFHTIVRRDGRLYYFILPKGAKPVELEDMDGDIECLQMRKIPNPTIFLPKLVFKDPEAFFRDNPEADEFVFLSGMKAPVTITRETYEAYRYKLYTVGKLRDGEVSEEEYKRALLQVLTAYKEFLENRMIYADLNFGFKDLEEYKDSSEFIKQVETHNTFMCWAKVSSSQLDDLVKSGNGLLFEIWSERLESYYKYGNEKVLRGYEGVLLSILKDENLVSMRTLLNSRPMLVYRPKESSKPMVVHRDGSRVVDRFDKDGKYIPPEVHDELYRFFNNLLIKEKLGEKARKILDNKKVKVKVLESERVKWSKFYDEQFAVTFSVKKNADCLDTTKDLNAEVMEQYSESNRLILIRNTTDILYYLVLDKNGKVLKQRSLNIINDGARDVDWKERFRQVTKDRNEGYNEWDYSRTSNDLKEVYLNYALKEIAEAVIEYNAILIIEKMSNAFKDKYSFLDDVTFKGFETKKLAKLSDLHFRGIKDGEPCSFTNPLQLCQNDSNKILQDGVIFMVPNSMTRSLDPDTGFIFAINDHNIRTKKAKLNFLSKFDQLKVSSEGCLIMKYSGDSLPTHNTDNRVWNCCCNHPITNYDRETKKVEFIEEPVEELSRVLEENGIETDTELNKLNERENVPGKVVDAIYSLVLNYLRGTVSGVAGQRAVYYSPVTGKKYDISFIQAMNLNRKCDYYRIGSKERGEWTDFVAQLIN

SEQ ID NO: 24 - protein, 1227 aa, unidentified
  REGION 1..1227: note = Lachnospiraceae bacterium
MSKLEKFTNCYSLSKTLRFKAIPVGKTQENIDNKRLLVEDEKRAEDYKGVKKLLDRYYLSFINDVLHSIKLKNLNNYISLFRKKTRTEKENKELENLEINLRKEIAKAFKGNEGYKSLFKKDIIETILPEFLDDKDEIALVNSFNGFTTAFTGFFDNRENMFSEEAKSTSIAFRCINENLTRYISNMDIFEKVDAIFDKHEVQEIKEKILNSDYDVEDFFEGEFFNFVLTQEGIDVYNAIIGGFVTESGEKIKGLNEYINLYNQKTKQKLPKFKPLYKQVLSDRESLSFYGEGYTSDEEVLEVFRNTLNKNSEIFSSIKKLEKLFKNFDEYSSAGIFVKNGPAISTISKDIFGEWNVIRDKWNAEYDDIHLKKKAVVTEKYEDDRRKSFKKIGSFSLEQLQEYADADLSVVEKLKEIIIQKVDEIYKVYGSSEKLFDADFVLEKSLKKNDAVVAIMKDLLDSVKSFENYIKAFFGEGKETNRDESFYGDFVLAYDILLKVDHIYDAIRNYVTQKPYSKDKFKLYFQNPQFMGGWDKDKETDYRATILRYGSKYYLAIMDKKYAKCLQKIDKDDVNGNYEKINYKLLPGPNKMLPKVFFSKKWMAYYNPSEDIQKIYKNGTFKKGDMFNLNDCHKLIDFFKDSISRYPKWSNAYDFNFSETEKYKDIAGFYREVEEQGYKVSFESASKKEVDKLVEEGKLYMFQIYNKDFSDKSHGTPNLHTMYFKLLFDENNHGQIRLSGGAELFMRRASLKKEELVVHPANSPIANKNPDNPKKTTTLSYDVYKDKRFSEDQYELHIPIANINKCPKNIFKINTEVRVLLKHDDNPYVIGIDRGERNLLYIVVVDGKGNIVEQYSLNEIINNFNGIRIKTDYHSLLDKKEKERFEARQNWTSIENIKELKAGYISQVVHKICELVEKYDAVIALEDLNSGFKNSRVKVEKQVYQKFEKMLIDKLNYMVDKKSNPCATGGALKGYQITNKFESFKSMSTQNGFIFYIPAWLTSKIDPSTGFVNLLKTKYTSIADKKFISSFDRIMYVPEEDLFEFALDYKNFSRTDADYIKKWKLYSYGNRIRIFRNPKKNNVFDWEEVCLTSAYKELFNKYGINYQQGDIRALLCEQSDKAFYSSFMALMSLMLQMRNSITGRTDVDFLISPVKNSDGIFYDSRNYEAQENAILPKNADANGAYNIARKVLWAIGQFKKAEDEKLDKVKIASNKEWLEYAQTSVKH

SEQ ID NO: 25 - protein, 1264 aa, Leptospira inadai
MEDYSGFVNIYSIQKTLRFELKPVGKTLEHIEKKGFLKKDKIRAEDYKAVKKIIDKYHRAYIEEVFDSVLHQKKKKDKTRFSTQFIKEIKEFSELYYKTEKNIPDKERLEALSEKLRKMLVGAFKGEFSEEVAEKYNKNLFSKELIRNEIEKFCETDEERKQVSNFKSFTTYFTGFHSNRQNIYSDEKKSTAIGYRIIHQNLPKFLDNLKIIESIQRRFKDFPWSDLKKNLKKIDKNIKLTEYFSIDGFVNVLNQKGIDAYNTILGGKSEESGEKIQGLNEYINLYRQKNNIDRKNPLNVKILFKQILGDRETKSFIPEAFPDDQSVLNSITEFAKYLKLDKKKKSIIAELKKFLSSFNRYELDGIYLANDNSLASISTFLFDDWSFIKKSVSFKYDESVGDPKKKIKSPLKYEKEKEKWLKQKYYTISFLNDAIESYSKSQDEKRVKIRLEAYFAEFKSKDDAKKQFDLLERIEEAYAIVEPLLGAEYPRDRNLKADKKEVGKIKDFLDSIKSLQFFLKPLLSAEIFDEKDLGFYNQLEGYYEEIDISGHLYNKVRNYLTGKIYSKEKFKLNFENSTLLKGWDENREVANLCVIFREDQKYYLGVMDKENNTILSDIPKVKPNELFYEKMVYKLIPTPHMQLPRIIFSSDNLSIYNPSKSILKIREAKSFKEGKNFKLKDCHKFIDFYKESISKNEDWSRFDFKFSKTSSYENISEFYREVERQGYNLDFKKVSKFYIDSLVEDGKLYLFQIYNKDFSIFSKGKPNLHTIYFRSLFSKENLKDVCLKLNGEAEMFFRKKSINYDEKKKREGHHPELFEKLKYPILKDKRYSEDKFQFHLPISLNFKSKERLNFNLKVNEFLKRNKDINIIGIDRGERNLLYLVMINQKGEILKQTLLDSMQSGKGRPEINYKEKLQEKEIERDKARKSWGTVENIKELKEGYLSIVIHQISKLMVENNAIVVLEDLNIGFKRGRQKVERQVYQKFEKMLIDKLNFLVFKENKPTEPGGVLKAYQLTDEFQSFEKLSKQTGFLFYVPSWNTSKIDPRTGFIDFLHPAYENIEKAKQWINKFDSIRFNSKMDWFEFTADTRKFSENLMLGKNRVWVICTTNVERYFTSKTANSSIQYNSIQITEKLKELFVDIPFSNGQDLKPEILRKNDAVFFKSLLFYIKTTLSLRQNNGKKGEEEKDFILSPVVDSKGRFFNSLEASDDEPKDADANGAYHIALKGLMNLLVLNETKEENLSRPKWKIKNKDWLEFVWERNR

SEQ ID NO: 26 - protein, 1373 aa, Moraxella bovoculi
MLFQDFTHLYPLSKTVRFELFIDRTLEHIHAKNFLSQDETMADMHQKVKVILDDYHRDFIADMMGEVKLTKLAEFYDVYLKFRKNPKDDELQKAQLKDLQAVLRKEIVKPIGNGGKYKAGYDRLFGAKLFKDGKELGDLAKFVIAQEGESSPKLAHLAHFEKFSTYFTGFHDNRKNMYSDEDKHTAIAYRLIHENLPRFIDNLQILTTIKQKHSALYDQIINELTASGLDVSLASHLDGYHKLLTQEGITAYNTLLGGISGEAGSPKIQGINELINSHHNQHCHKSERIAKLRPLHKQILSDGMSVSFLPSKFADDSEMCQAVNEFYRHYADVFAKVQSLFDGFDDHQKDGIYVEHKNLNELSKQAFGDFALLGRVLDGYYVDVVNPEFNERFAKAKTDNAKAKLTKEKDKFIKGVHSLASLEQAIEHYTARHDDESVQAGKLGQYFKHGLAGVDNPIQKIHNNHSTIKGFLERERPAGERALPKIKSGKNPEMTQLRQLKELLDNALNVAHFAKLLTTKTTLDNQDGNFYGEFGVLYDELAKIPTLYNKVRDYLSQKPFSTEKYKLNFGNPTLLNGWDLNKEKDNFGVILQKDGCYYLALLDKAHKKVFDNAPNTGKSIYQKMIYKYLEVRKQFPKVFFSKEAIAINYHPSKELVEIKDKGRQRSDDERLKLYRFILECLKIHPKYDKKFEGAIGDIQLFKKDKKGREVPISEKDLFKDINGIFSSKPKLEMEDFFIGEFKRYNPSQDLVDQYNIYKKIDSNDNRKKENFYNNHPKFKKDLVRYYYESMCKHEEWEESFEFSKKLQDIGCYVDVNELFTEIETRRLNYKISFCNINADYIDELVEQGQLYLFQIYNKDFSPKAHGKPNLHTLYFKALFSEDNLADPIYKLNGEAQIFYRKASLDMNETTIHRAGEVLENKNPDNPKKRQFVYDIIKDKRYTQKDFMLHVPITMNFGVQGMTIKEFNKKVNQSIQQYDEVNVIGIDRGERHLLYLTVINSKGEILEQCSLNDITTASANGTQMTTPYHKILDKREIERLNARVGWGEIETIKELKSGYLSHVVHQISQLMLKYNAIVVLEDLNFGFKRGRFKVEKQIYQNFENALIKKLNHLVLKDKADDEIGSYKNALQLTNNFTDLKSIGKQTGFLFYVPAWNTSKIDPETGFVDLLKPRYENIQASQAFFGKFDKICYNADKDYFEFHIDYAKFTDKAKNSRQIWTICSHGDKRYVYDKTANQNKGAAKGINVNDILKSLFARHHINEKQPNLVMDICQNNDKEFHKSLMYLLKTLLALRYSNASSDEDFILSPVANDEGVFFNSALADDTQPQNADANGAYHIALKGLWLLNELKNSDDLNKVKLAIDNQTWLNFAQNR

SEQ ID NO: 27 - protein, 1352 aa, unidentified
  REGION 1..1352: note = Parcubacteria bacterium
MENIFDQFIGKYSLSKTLRFELKPVGKTEDFLKINKVFEKDQTIDDSYNQAKFYFDSLHQKFIDAALASDKTSELSFQNFADVLEKQNKIILDKKREMGALRKRDKNAVGIDRLQKEINDAEDIIQKEKEKIYKDVRTLFDNEAESWKTYYQEREVDGKKITESKADLKQKGADFLTAAGILKVLKYEFPEEKEKEFQAKNQPSLFVEEKENPGQKRYIFDSFDKFAGYLTKFQQTKKNLYAADGTSTAVATRIADNFIIFHQNTKVFRDKYKNNHTDLGFDEENIFEIERYKNCLLQREIEHIKNENSYNKIIGRINKKIKEYRDQKAKDTKLTKSDFPFFKNLDKQILGEVEKEKQLIEKTREKTEEDVLIERFKEFIENNEERFTAAKKLMNAFCNGEFESEYEGIYLKNKAINTISRRWFVSDRDFELKLPQQKSKNKSEKNEPKVKKFISIAEIKNAVEELDGDIFKAVFYDKKIIAQGGSKLEQFLVIWKYEFEYLFRDIERENGEKLLGYDSCLKIAKQLGIFPQEKEAREKATAVIKNYADAGLGIFQMMKYFSLDDKDRKNTPGQLSTNFYAEYDGYYKDFEFIKYYNEFRNFITKKPFDEDKIKLNFENGALLKGWDENKEYDFMGVILKKEGRLYLGIMHKNHRKLFQSMGNAKGDNANRYQKMIYKQIADASKDVPRLLLTSKKAMEKFKPSQEILRIKKEKTFKRESKNFSLRDLHALIEYYRNCIPQYSNWSFYDFQFQDTGKYQNIKEFTDDVQKYGYKISFRDIDDEYINQALNEGKMYLFEVVNKDIYNTKNGSKNLHTLYFEHILSAENLNDPVFKLSGMAEIFQRQPSVNEREKITTQKNQCILDKGDRAYKYRRYTEKKIMFHMSLVLNTGKGEIKQVQFNKIINQRISSSDNEMRVNVIGIDRGEKNLLYYSVVKQNGEIIEQASLNEINGVNYRDKLIEREKERLKNRQSWKPVVKIKDLKKGYISHVIHKICQLIEKYSAIVVLEDLNMRFKQIRGGIERSVYQQFEKALIDKLGYLVFKDNRDLRAPGGVLNGYQLSAPFVSFEKMRKQTGILFYTQAEYTSKTDPITGFRKNVYISNSASLDKIKEAVKKFDAIGWDGKEQSYFFKYNPYNLADEKYKNSTVSKEWAIFASAPRIRRQKGEDGYWKYDRVKVNEEFEKLLKVWNFVNPKATDIKQEIIKKIKAGDLQGEKELDGRLRNFWHSFIYLFNLVLELRNSFSLQIKIKAGEVIAVDEGVDFIASPVKPFFTTPNPYIPSNLCWLAVENADANGAYNIARKGVMILKKIREHAKKDPEFKKLPNLFISNAEWDEAARDWGKYAGTTALNLDH

SEQ ID NO: 28 - protein, 1260 aa, Porphyromonas crevioricanis
MDSLKDFTNLYPVSKTLRFELKPVGKTLENIEKAGILKEDEHRAESYRRVKKIIDTYHKVFIDSSLENMAKMGIENEIKAMLQSFCELYKKDHRTEGEDKALDKIRAVLRGLIVGAFTGVCGRRENTVQNEKYESLFKEKLIKEILPDFVLSTEAESLPFSVEEATRSLKEFDSFTSYFAGFYENRKNIYSTKPQSTAIAYRLIHENLPKFIDNILVFQKIKEPIAKELEHIRADFSAGGYIKKDERLEDIFSLNYYIHVLSQAGIEKYNALIGKIVTEGDGEMKGLNEHINLYNQQRGREDRLPLFRPLYKQILSDREQLSYLPESFEKDEELLRALKEFYDHIAEDILGRTQQLMTSISEYDLSRIYVRNDSQLTDISKKMLGDWNAIYMARERAYDHEQAPKRITAKYERDRIKALKGEESISLANLNSCIAFLDNVRDCRVDTYLSTLGQKEGPHGLSNLVENVFASYHEAEQLLSFPYPEENNLIQDKDNVVLIKNLLDNISDLQRFLKPLWGMGDEPDKDERFYGEYNYIRGALDQVIPLYNKVRNYLTRKPYSTRKVKLNFGNSQLLSGWDRNKEKDNSCVILRKGQNFYLAIMNNRHKRSFENKMLPEYKEGEPYFEKMDYKFLPDPNKMLPKVFLSKKGIEIYKPSPKLLEQYGHGTHKKGDTFSMDDLHELIDFFKHSIEAHEDWKQFGFKFSDTATYENVSSFYREVEDQGYKLSFRKVSESYVYSLIDQGKLYLFQIYNKDFSPCSKGTPNLHTLYWRMLFDERNLADVIYKLDGKAEIFFREKSLKNDHPTHPAGKPIKKKSRQKKGEESLFEYDLVKDRRYTMDKFQFHVPITMNFKCSAGSKVNDMVNAHIREAKDMHVIGIDRGERNLLYICVIDSRGTILDQISLNTINDIDYHDLLESRDKDRQQEHRNWQTIEGIKELKQGYLSQAVHRIAELMVAYKAVVALEDLNMGFKRGRQKVESSVYQQFEKQLIDKLNYLVDKKKRPEDIGGLLRAYQFTAPFKSFKEMGKQNGFLFYIPAWNTSNIDPTTGFVNLFHVQYENVDKAKSFFQKFDSISYNPKKDWFEFAFDYKNFTKKAEGSRSMWILCTHGSRIKNFRNSQKNGQWDSEEFALTEAFKSLFVRYEIDYTADLKTAIVDEKQKDFFVDLLKLFKLTVQMRNSWKEKDLDYLISPVAGADGRFFDTREGNKSLPKDADANGAYNIALKGLWALRQIRQTSEGGKLKLAISNKEWLQFVQERSYEKD

SEQ ID NO: 29 - protein, 1324 aa, Prevotella disiens
MENYQEFTNLFQLNKTLRFELKPIGKTCELLEEGKIFASGSFLEKDKVRADNVSYVKKEIDKKHKIFIEETLSSFSISNDLLKQYFDCYNELKAFKKDCKSDEEEVKKTALRNKCTSIQRAMREAISQAFLKSPQKKLLAIKNLIENVFKADENVQHFSEFTSYFSGFETNRENFYSDEEKSTSIAYRLVHDNLPIFIKNIYIFEKLKEQFDAKTLSEIFENYKLYVAGSSLDEVFSLEYFNNTLTQKGIDNYNAVIGKIVKEDKQEIQGLNEHINLYNQKHKDRRLPFFISLKKQILSDREALSWLPDMFKNDSEVIDALKGFYIEDGFENNVLTPLATLLSSLDKYNLNGIFIRNNEALSSLSQNVYRNFSIDEAIDAQNAELQTFNNYELIANALRAKIKKETKQGRKSFEKYEEYIDKKVKAIDSLSIQEINELVENYVSEFNSNSGNMPRKVEDYFSLMRKGDFGSNDLIENIKTKLSAAEKLLGTKYQETAKDIFKKDENSKLIKELLDATKQFQHFIKPLLGTGEEADRDLVFYGDFLPLYEKFEELTLLYNKVRNRLTQKPYSKDKIRLCFNKPKLMTGWVDSKTEKSDNGTQYGGYLFRKKNEIGEYDYFLGISSKAQLFRKNEAVIGDYERLDYYQPKANTIYGSAYEGENSYKEDKKRLNKVIIAYIEQIKQTNIKKSIIESISKYPNISDDDKVTPSSLLEKIKKVSIDSYNGILSFKSFQSVNKEVIDNLLKTISPLKNKAEFLDLINKDYQIFTEVQAVIDEICKQKTFIYFPISNVELEKEMGDKDKPLCLFQISNKDLSFAKTFSANLRKKRGAENLHTMLFKALMEGNQDNLDLGSGAIFYRAKSLDGNKPTHPANEAIKCRNVANKDKVSLFTYDIYKNRRYMENKFLFHLSIVQNYKAANDSAQLNSSATEYIRKADDLHIIGIDRGERNLLYYSVIDMKGNIVEQDSLNIIRNNDLETDYHDLLDKREKERKANRQNWEAVEGIKDLKKGYLSQAVHQIAQLMLKYNAIIALEDLGQMFVTRGQKIEKAVYQQFEKSLVDKLSYLVDKKRPYNELGGILKAYQLASSITKNNSDKQNGFLFYVPAWNTSKIDPVTGFTDLLRPKAMTIKEAQDFFGAFDNISYNDKGYFEFETNYDKFKIRMKSAQTRWTICTFGNRIKRKKDKNYWNYEEVELTEEFKKLFKDSNIDYENCNLKEEIQNKDNRKFFDDLIKLLQLTLQMRNSDDKGNDYIISPVANAEGQFFDSRNGDKKLPLDADANGAYNIARKGLWNIRQIKQTKNKDDLNLSISSTEWLDFVREKPYLK

SEQ ID NO: 30 - protein, 1484 aa, unidentified
  REGION 1..1484: note = Peregrinibacteria bacterium
MSNFFKNFTNLYELSKTLRFELKPVGDTLTNMKDHLEYDEKLQTFLKDQNIDDAYQALKPQFDEIHEEFITDSLESKKAKEIDFSEYLDLFQEKKELNDSEKKLRNKIGETFNKAGEKWKKEKYPQYEWKKGSKIANGADILSCQDMLQFIKYKNPEDEKIKNYIDDTLKGFFTYFGGFNQNRANYYETKKEASTAVATRIVHENLPKFCDNVIQFKHIIKRKKDGTVEKTERKTEYLNAYQYLKNNNKITQIKDAETEKMIESTPIAEKIFDVYYFSSCLSQKQIEEYNRIIGHYNLLINLYNQAKRSEGKHLSANEKKYKDLPKFKTLYKQIGCGKKKDLFYTIKCDTEEEANKSRNEGKESHSVEEIINKAQEAINKYFKSNNDCENINTVPDFINYILTKENYEGVYWSKAAMNTISDKYFANYHDLQDRLKEAKVFQKADKKSEDDIKIPEAIELSGLFGVLDSLADWQTTLFKSSILSNEKLKIITDSQTPSEALLKMIFNDIEKNMESFLKETNDIITLKKYKGNKEGTEKIKQWFDYTLAINRMLKYFLVKENKIKGNSLDTNISEALKTLIYSDDAEWFKWYDALRNYLTQKPQDEAKENKLKLNFDNPSLAGGWDVNKECSNFCVILKDKNEKKYLAMIKKGENTLFQKEWTEGRGKNLTKKSNPLFEINNCEILSKMEYDFWADVSKMIPKCSTQLKAVVNHFKQSDNEFIFPIGYKVTSGEKFREECKISKQDFELNNKVFNKNELSVTAMRYDLSSTQEKQYIKAFQKEYWELLFKQEKRDTKLTNNEIFNEWINFCNKKYSELLSWERKYKDALTNWINFCKYFLSKYPKTTLFNYSFKESENYNSLDEFYRDVDICSYKLNINTTINKSILDRLVEEGKLYLFEIKNQDSNDGKSIGHKNNLHTIYWNAIFENFDNRPKLNGEAEIFYRKAISKDKLGIVKGKKTKNGTWIIKNYRFSKEKFILHVPITLNFCSNNEYVNDIVNTKFYNFSNLHFLGIDRGEKHLAYYSLVNKNGEIVDQGTLNLPFTDKDGNQRSIKKEKYFYNKQEDKWEAKEVDXWNYNDLLDAMASNRDMARKNWQRIGTIKEAKNGYVSLVIRKIADLAVNNERPAFIVLEDLNTGFKRSRQKIDKSVYQKFELALAKKLNFLVDKNAKRDEIGSPTKALQLTPPVNNYGDIENKKQAGIMLYTRANYTSQTDPATGWRKTIYLKAGPEETTYKKDGKIKNKSVKDQIIETFTDIGFDGKDYYFEYDKGEFVDEKTGEIKPKKWRLYSGENGKSLDRFRGEREKDKYEWKIDKIDIVKILDDLFVNFDKNISLLKQLKEGVELTRNNEHGTGESLRFAINLIQQIRNTGNNERDNDFILSPVRDENGKHFDSREYWDKETKGEKISMPSSGDANGAFNIARKGIIMNAHILANSDSKDLSLFVSDEEWDLHLNNKTEWKKQLNIFSSRKAMAKRKKKRPAATKK

SEQ ID NO: 31 - protein, 1245 aa, Porphyromonas macacae
MKTQHFFEDFTSLYSLSKTIRFELKPIGKTLENIKKNGLIRRDEQRLDDYEKLKKVIDEYHEDFIANILSSFSFSEEILQSYIQNLSISEARAKIEKTMRDTLAKAFSEDERYKSIFKKELVKKDIPVWCPAYKSLCKKFDNFTTSLVPFHENRKNLYTSNEITASIPYRIVHVNLPKFIQNIEALCELQKKMGADLYLEMMENLRNVWPSFVKTPDDLCNLKTYNHLMVQSSISEYNRFVGGYSTEDGTKHQGINEWINIYRQRNKEMRLPGLVFLHKQILAKVDSSSFISDTLENDDQVFCVLRQFRKLFWNTVSSKEDDAASLKDLFCGLSGYDPEAIYVSDAHLATISKNIFDRWNYISDAIRRKTEVLMPRKKESVERYAEKISKQIKKRQSYSLAELDDLLAHYSEESLPAGFSLLSYFTSLGGQKYLVSDGEVILYEEGSNIWDEVLIAFRDLQVILDKDFTEKKLGKDEEAVSVIKKALDSALRLRKFFDLLSGTGAEIRRDSSFYALYTDRMDKLKGLLKMYDKVRNYLTKKPYSIEKFKLHFDNPSLLSGWDKNKELNNLSVIFRQNGYYYLGIMTPKGKNLFKTLPKLGAEEMFYEKMEYKQIAEPMLMLPKVFFPKKTKPAFAPDQSVVDIYNKKTFKTGQKGFNKKDLYRLIDFYKEALTVHEWKLFNFSFSPTEQYRNIGEFFDEVREQAYKVSMVNVPASYIDEAVENGKLYLFQIYNKDFSPYSKGIPNLHTLYWKALFSEQNQSRVYKLCGGGELFYRKASLHMQDTTVHPKGISIHKKNLNKKGETSLFNYDLVKDKRFTEDKFFFHVPISINYKNKKITNVNQMVRDYIAQNDDLQHGIDRGERNLLYISRIDTRGNLLEQFSLNVIESDKGDLRTDYQKILGDREQERLRRRQEWKSIESIKDLKDGYMSQVVHKICNMVVEHKAIVVLENLNLSFMKGRKKVEKSVYEKFERMLVDKLNYLVVDKKNLSNEPGGLYAAYQLTNPLFSFEELHRYPQSGILFFVDPWNTSLTDPSTGFVNLLGRINYTNVGDARKFFDRFNAIRYDGKGNILFDLDLSRFDVRVETQRKLWTLTTFGSRIAKSKKSGKWMVERIENLSLCFLELFEQFNIGYRVEKDLKKAILSQDRKEFYVRLIYLFNLMMQIRNSDGEEDYILSPALNEKNLQFDSRLIEAKDLPVDADANGAYNVARKGLMVVQRIKRGDHESIHRIGRAQWLRYVQEGIVE

SEQ ID NO: 32 - protein, 1250 aa, Smithella sp.
MQTLFENFTNQYPVSKTLRFELIPQGKTKDFIEQKGLLKKDEDRAEKYKKVKNIIDEYHKDFIEKSLNGLKLDGLEKYKTLYLKQEKDDKDKKAFDKEKENLRKQIANAFRNNEKFKTLFAKELIKNDLMSFACEEDKKNVKEFEAFTTYFTGFHQNRANMYVADEKRTAIASRLIHENLPKFIDNIKIFEKMKKEAPELLSPFNQTLKDMKDVIKGTTLEEIFSLDYFNKTLTQSGIDIYNSVIGGRTPEEGKTKIKGLNEYINTDFNQKQTDKKKRQPKFKQLYKQILSDRQSLSFIAEAFKNDTEILEAIEKFYVNELLHFSNEGKSTNVLDAIKNAVSNLESFNLTKMYFRSGASLTDVSRKVFGEWSIINRALDNYYATTYPIKPREKSEKYEERKEKWLKQDFNVSLIQTAIDEYDNETVKGKNSGKVIADYFAKFCDDKETDLIQKVNEGYIAVKDLLNTPCPENEKLGSNKDQVKQIKAFMDSIMDIMHFVRPLSLKDTDKEKDETFYSLFTPLYDHLTQTIALYNKVRNYLTQKPYSTEKIKLNFENSTLLGGWDLNKETDNTAIILRKDNLYYLGIMDKRHNRIFRNVPKADKKDFCYEKMVYKLLPGANKMLPKVFFSQSRIQEFTPSAKLLENYANETHKKGDNFNLNHCHKLIDFFKDSINKHEDWKNFDFRFSATSTYADLSGFYHEVEHQGYKISFQSVADSFIDDLVNEGKLYLFQIYNKDFSPFSKGKPNLHTLYWKMLFDENNLKDVVYKLNGEAEVFYRKKSIAEKNTTIHKANESIINKNPDNPKATSTFNYDIVKDKRYTIDKFQFHIPITMNFKAEGIFNMNQRVNQFLKANPDINIIGIDRGERHLLYYALINQKGKILKQDTLNVIANEKQKVDYHNLLDKKEGDRATARQEWGVIETIKELKEGYLSQVIHKLTDLMIENNAIIVMEDLNFGFKRGRQKVEKQVYQKFEKMLIDKLNYLVDKNKKANELGGLLNAFQLANKFESFQKMGKQNGFIFYVPAWNTSKTDPATGFIDFLKPRYENLNQAKDFFEKFDSIRLNSKADYFEFAFDFKNFTEKADGGRTKWTVCTTNEDRYQWNRALNNNRGSQEKYDITAELKSLFDGKVDYKSGKDLKQQIASQESADFFKALMKNLSITLSLRHNNGEKGDNEQDYILSPVADSKGRFFDSRKADDDMPKNADANGAYHIALKGLWCLEQISKTDDLKKVKLAISNKEWLEFVQTLKG

SEQ ID NO: 33 - DNA, 3987 bp, synthetic construct
  misc_feature 1..3987: note = Cas12a polynucleotide
  source 1..3987: mol_type = other DNA
atggccgggagcaagaagcgccggataaagcaggacacgcagttcgagggcttcaccaacctgtaccaagtctccaagacgctccggttcgagcttatcccgcaagggaagaccctgaaacacatccaggaacaaggtttcatcgaggaggacaaggcccgcaacgaccactacaaggagctcaagcccataatcgatcggatctacaagacgtacgccgaccagtgcctccaactggtgcagctcgactgggagaacctgagcgccgccattgacagctaccgcaaggaaaagacggaggagacgcgcaacgcccttattgaggagcaagccacctaccgcaacgccatccacgactacttcatcgggcgcaccgacaacctgacggacgcgatcaacaagcgccacgcggaaatctacaagggccttttcaaggccgagctcttcaacgggaaggtcctaaaacagctcgggactgtcacgacaaccgagcatgagaacgccctccttcgcagcttcgacaagttcaccacatacttctcgggcttctaccggaaccgcaagaacgttttcagcgccgaggacatctccaccgccatcccgcacaggatcgtccaggacaacttccccaagttcaaggagaactgccacatcttcacgcgcctgattacagccgtaccttcacttcgtgagcacttcgagaacgtcaaaaaggccatcgggatcttcgtctccacgtccatcgaggaggtattctctttcccgttctataaccagctcctgacccagacgcagatcgacctctacaaccagctactgggcggcatcagccgggaggccgggaccgagaaaataaagggcctcaacgaagttctcaacctggccatccagaagaacgacgagaccgcgcatatcatcgcatccctgccgcatcgcttcattcctttgttcaagcagatattgagcgaccggaacaccctctcgttcatcctcgaagaattcaagagcgacgaggaggtcattcagtctttctgcaagtacaagacgctcctacggaatgagaatgtgctggagaccgcggaggcactcttcaatgagctgaactccattgacctgacccacatcttcattagccacaagaaactggagacgatctccagcgccctgtgcgaccactgggacactctccgcaacgccctctacgaacgccggatctccgaacttaccggcaagataactaagtcggctaaggagaaggtgcaacggagcctcaagcacgaggacatcaaccttcaggaaatcatctcagccgcgggcaaggagctgagcgaggcgtttaagcagaaaacatcggagatactgagccacgcgcacgcggccctggatcaaccgctgccgacgactctcaagaagcaagaggagaaggaaatccttaagtcccagctcgactcgctgctcggcctctatcacttgctcgactggttcgcggttgatgagtccaacgaggtggacccggagttctccgcgcgcctcacgggtattaagctggagatggagccaagcttaagcttctacaacaaggcccgcaactacgcgaccaaaaaaccgtactcagtcgagaaattcaagctgaatttccagatgcctacattggcgagggggtgggacgtgaaccgcgagaagaacaatggagccatcctgttcgtcaaaaatgggttgtactacctgggcatcatgcccaagcagaagggccgttacaaggccctgtcattcgagcctaccgagaagacctcggagggcttcgacaagatgtactacgactatttcccggacgccgccaagatgatcccgaagtgctccacgcagctcaaagccgtcacggcccacttccagacgcataccacgccgatacttctgagcaacaacttcattgagccgctagagatcacgaaggagatatacgacctaaacaaccccgaaaaggagcccaagaagttccagacagcctacgctaagaagacaggtgatcagaagggatatagggaggcactctgcaagtggatcgacttcacgcgcgacttcctgtcgaaatatacaaagacgaccagcattgacctaagttctctccgcccatcctcccagtacaaggatctgggcgagtattatgcggagctgaacccattgctgtaccacatcagcttccagaggatcgccgagaaggagattatggacgcggtggagacggggaaactatacctgttccaaatatataacaaggacttcgctaaagggcaccacgggaagcccaacctgcacacactctactggacgggcttgttttcgccagaaaatttggccaagacttcgatcaagctcaacggccaggcggagttgttttaccgtcccaagtctcgcatgaagcgcatggcgcatcgcctcggagagaaaatgcttaacaagaagctcaaggatcagaagacgcccatacctgatacgttgtaccaggaattgtacgactacgtgaaccaccgcctatcgcacgacctctcagacgaggcccgcgccctcctcccaaacgtgattactaaggaggtttcccatgaaataatcaaggaccgacggttcaccagcgacaaattttttttccacgtgcctatcacgctcaattaccaggcggccaactccccatcgaagttcaaccagcgcgtgaacgcctaccttaaggagcacccggagaccccaatcatcgggatcgaccgtggcgagcggaacctgatctatattacggtgatcgatagcaccgggaagatcctggagcagcgctccctgaacacaatccagcagtttgactaccagaagaaactcgacaaccgggagaaggagcgcgtcgcagcccggcaagcatggagtgtggtcggcaccataaaggacctgaaacagggttacctaagtcaagttatccacgagatcgttgacctgatgatacactatcaagccgtagtcgtgctggagaacctcaacttcgggtttaagtccaagcgcaccggcatcgcggagaaggcggtgtaccagcagttcgagaagatgctgatcgacaagctgaactgcctggtgctcaaggactaccctgcggagaaggtcggcggggtcttgaacccgtaccagctaaccgaccagttcacgagcttcgccaaaatgggcacgcagtccggattcttgttttatgtcccggctccatatacaagtaagatcgacccgctgacagggtttgttgacccattcgtgtggaagaccatcaagaaccacgagagcaggaaacacttcttagagggcttcgacttcctgcattacgacgttaagacaggcgacttcatcctgcacttcaagatgaaccgcaacctgtcgttccagaggggcctgcccggcttcatgcccgcctgggatatcgtctttgagaagaatgagacgcagttcgacgcgaaggggacgccgttcatcgctggaaagcggatcgtgccggtcatcgagaaccaccgcttcacgggtcgctaccgagatttataccccgccaacgaactaattgcgctgctggaggagaaggggatcgtgttccgagatggcagcaacattctcccgaagctgctggagaacgacgactcgcacgctattgacacgatggtcgccctcatacggagcgtgcttcagatgcggaacagtaacgctgccacgggcgaggactacattaactcccccgtccgcgacctcaacggggtctgcttcgatagccgcttccagaacccggagtggcctatggatgcggacgcgaacggggcctaccacatcgccctcaagggccaactcctgctcaaccacttgaaggaaagcaaagacctcaaattgcagaatggcatcagtaaccaggactggctcgcgtacatccaggaactgagaaacgggtccaagaagcggcgtatcaagcaagattga

SEQ ID NO: 34 - DNA, 3987 bp, synthetic construct
  misc_feature 1..3987: note = Cas12a polynucleotide
  source 1..3987: mol_type = other DNA
atggcgggaagcaaaaagcgccggattaagcaagacacgcagttcgagggcttcacgaacctctaccaagtcagcaagaccctccggttcgagctgataccacagggaaagacgctcaagcacatccaggaacagggcttcatcgaggaggacaaggcgcgcaacgaccactacaaggagttgaaaccgatcatcgaccgcatctacaagacgtacgccgaccagtgcctccagctcgtgcagctcgactgggagaacctctccgccgccattgactcgtaccggaaggagaagactgaggagacccgcaacgccctgatcgaggagcaagcaacctaccggaacgccatccacgactacttcatcggccgcaccgacaacctcaccgacgcgatcaacaagcggcacgcggagatatacaaagggctgttcaaggcggagctgttcaacggcaaggtgctcaagcagctagggacggtgaccacgaccgagcacgagaacgcgctcctccgcagcttcgacaagttcaccacctacttcagcggcttctaccggaaccgcaagaatgtgttcagcgcggaggacatcagcacggccatcccgcaccgcatcgtccaggacaacttcccgaagttcaaggagaactgccacatcttcacccgcctgataaccgccgtcccctccctgcgggagcacttcgagaacgtcaaaaaggcaattgggatcttcgtctcgaccagcattgaggaggtgttcagcttccccttctacaaccagctcctcacccagacgcagatcgacctgtacaatcagttgctcggcgggataagccgcgaggcgggaaccgaaaaaatcaaggggctgaacgaagtgttgaacctcgccatccagaagaacgacgagaccgcgcacatcatcgcctccctgccccaccggttcatcccgctgttcaagcagatcctctctgaccggaacaccctgtccttcattcttgaggagttcaagtcggacgaggaggtcatccagagcttctgcaagtacaagacgctgctacggaacgagaacgtgctggagacggcggaggcactgttcaacgagctaaacagcatcgacctcacgcacatcttcatcagtcacaagaaactggagaccatctcctccgcgctgtgcgaccactgggacacgctcaggaacgcgctctacgagcgccgaatcagtgagctgacgggcaagatcacgaagtccgcgaaggagaaggtgcagcggtccctcaagcacgaggacatcaacctccaggagatcatctcagcggctgggaaagagctgtccgaggcgttcaagcagaaaacgagcgaaatcctgtcccacgcgcacgcggccctggatcagcctctgccgacgaccctcaagaaacaagaagaaaaggaaatcctcaagtcgcagctcgactcgctgctgggcctgtaccatctcctcgactggttcgccgtggacgagagcaacgaggtggaccccgagttctccgcgcggcttacggggatcaagctggagatggagcccagcctgtccttctacaacaaggcgcgcaactacgccaccaagaagccctacagcgtggagaagttcaagctcaacttccagatgcccactctcgcacgtgggtgggacgtcaaccgcgaaaaaaataatggggcgatcctgttcgtcaagaacggcctgtactacttgggcatcatgccgaaacagaagggccgctacaaggccctgagcttcgaaccgaccgagaaaacgagcgaggggttcgacaagatgtactacgactacttccccgacgccgcgaagatgattccaaagtgctccacgcagcttaaggccgtgacggcccacttccagacgcacacgaccccgatcctcctcagcaacaacttcatcgagcccctggagatcacgaaggagatatacgacctgaacaacccggagaaggagcccaagaaattccagaccgcctacgccaagaagacaggcgaccaaaagggttacagggaggccctctgcaagtggatcgacttcactagggacttcctgtccaagtacaccaagactacctctatcgacctgtccagcctccgcccgtcgtcccagtacaaagatttgggcgagtattacgcggagctgaacccactgctctaccacatcagcttccagcgcatcgcggagaaggagatcatggacgcagtggagacgggcaagctatacctatttcagatatacaacaaagacttcgctaagggacaccacggcaagcctaacctgcacaccctctactggacggggctcttcagcccggagaacctcgccaagacctcgatcaagctcaacggccaggccgagctgttctaccggcccaagtcccgcatgaagcggatggcccaccggctcggggagaaaatgctcaacaagaaattgaaggaccaaaaaacgccgatacccgacaccctataccaggagctgtacgactatgtgaaccaccgcctgagccacgacctcagcgacgaggcgcgggccctcctgccgaacgtcatcacaaaggaggtcagccacgagatcatcaaggaccggcgcttcacctccgacaagtttttctttcacgtgcccatcacgctcaactaccaggccgccaactcgccgtccaagttcaaccagcgcgtgaacgcctacctcaaggagcaccccgagaccccgatcatcgggattgaccgaggggagcggaacctcatctacatcaccgtcatcgacagcaccgggaagatccttgaacagcggtcgctcaacaccatccagcagttcgactaccagaagaaactcgacaaccgggagaaggagagagtggcggcccgccaggcttggtccgtcgtcgggacgattaaggacttgaaacaaggttacctgtcgcaagtgatccacgagatcgttgacctgatgatccactaccaagccgtcgtggtcctggagaacctcaacttcggcttcaagagcaaacgaaccggcatcgcggagaaggccgtgtaccagcagttcgaaaaaatgctgatcgacaagctgaactgcctcgtgctcaaggactaccccgctgagaaggtcggcggggtgctgaacccgtaccagctcactgaccagttcaccagcttcgcaaagatgggcacccagtccggcttcctgttctacgtgcctgcgccatacacctcgaagatcgacccgctcaccgggttcgtggaccccttcgtctggaagaccatcaagaaccacgagagccgcaagcacttcctggagggcttcgacttcctccactacgacgtcaagaccggggacttcatcctgcacttcaagatgaaccgcaacctcagtttccagcgcggcctgccggggttcatgcccgcttgggatatagtcttcgagaagaatgagacgcagttcgacgcgaagggcaccccgttcatcgccgggaagcgcatcgtgccggtcatcgagaaccaccggttcaccgggcgctaccgcgacctatacccggcgaacgagttgatcgccctcctggaggagaagggcatcgtgttccgcgacggctccaacatcctcccgaagctgctcgaaaacgacgactcccacgccatcgacacgatggtcgcgctgatccggtcggtgctccagatgcggaactccaacgccgcgacgggcgaggactacatcaacagtccggtccgcgatctgaacggcgtctgcttcgactcccggttccagaaccccgagtggccgatggacgcggacgcgaacggcgcataccacatcgccctaaaagggcaattgctgctcaaccacctcaaggaatccaaagacctaaagctccagaacggcatctccaaccaggactggctggcgtacatccaggaactgcggaacgggagcaaaaaacgtcggatcaagcaagattga

SEQ ID NO: 35 - DNA, 3987 bp, synthetic construct
  misc_feature 1..3987: note = Cas12a polynucleotide
  source 1..3987: mol_type = other DNA
atggcgggctccaagaaacgccggattaagcaagatacccagttcgaggggttcacgaacctctaccaagtgagcaagaccctccgattcgaactgattcctcaggggaagaccctcaagcacatccaggagcaagggttcatcgaggaggacaaggcgcggaacgaccactacaaggaactcaaacccatcatcgaccgcatctacaagacctacgccgatcagtgcctccagctcgtgcagttggactgggagaacctcagcgcggccattgactcctaccggaaggagaaaacggaggagacgcgcaacgcgctcatcgaggaacaggcaacctatcgcaacgccatccacgactacttcatcgggaggactgacaacctcactgacgcgattaacaagcgccacgcggagatatacaagggactcttcaaagcggagctgtttaacggcaaggttctcaagcaactcggcactgtgaccacgaccgagcatgagaacgccctgctccgctccttcgacaagttcaccacctacttctccgggttctaccgcaaccgcaagaatgtcttcagcgcggaggacatcagcacggccattccacatcgaatcgtccaagataacttcccgaagttcaaggagaactgccacatcttcacccgactcattactgctgtaccgtcgttacgcgaacacttcgagaacgtcaagaaggcaattggaatcttcgtctctacgtcaatagaggaggtgttcagcttccctttctacaaccagctccttacgcagacccagatagacctgtacaatcagctcctcggtgggatcagccgggaggcggggactgagaagattaaagggctcaacgaggtcttgaacctggccatccaaaaaaacgatgagacggcgcacatcatcgcctcgctgccccaccggttcatcccgctgttcaagcagatcctcagtgacaggaacaccttgagctttatcctagaggagttcaagagcgacgaggaggtgatccagagcttctgcaagtacaaaaccctgctgaggaacgagaacgtcctggagacggcggaggcgctgttcaacgagctgaactctatcgacttaactcacatattcatctcgcacaagaagctggagactattagctctgcactctgcgaccactgggacaccctccgcaacgcgctctacgagcgccgcatctcggagctgaccgggaagatcaccaaatccgcgaaggaaaaggtccagcgttccctcaaacacgaggatattaacttacaggagattatctcagcggctgggaaggagttgtcagaggcgttcaagcagaaaacttccgagatcctgagccacgcgcacgcagcgctcgaccagcctctgcccaccaccctcaaaaagcaggaagaaaaagagatcctcaagagccagttggactccctgctggggctctatcaccttctcgactggttcgccgtcgatgagtcgaacgaggtggaccccgagttctccgcccggctgaccggcatcaagctagagatggagccgtccctcagcttctacaataaggcccgcaactacgcgaccaaaaaaccctacagcgtggagaagttcaagctgaacttccagatgccgaccttagcacgcggttgggacgtaaacagggagaagaacaatggagccatcctgttcgtcaagaacgggctttactacctcgggataatgcccaagcagaagggccgctacaaggccctttccttcgagccgacggagaaaacctccgaggggttcgacaagatgtactacgactacttccccgacgccgccaagatgatcccgaagtgctcaacgcagctaaaagccgtgaccgcccacttccagacccacacgacgccgatcctgctgagcaacaacttcatcgagccccttgagatcactaaggagatatacgacctgaacaaccccgagaaggagcccaagaagtttcaaaccgcctacgccaaaaaaactggcgaccaaaagggctacagggaggcgctgtgtaagtggatcgacttcacacgcgacttcctttcgaagtatacgaagacaacctctattgacctgagcagcctgcgtcctagctcccagtacaaagatttgggcgagtactacgcggagcttaatccactactctaccacatctcattccagcgcatcgctgagaaggaaatcatggacgcggtggagacaggcaaactgtacctcttccagatatacaacaaagacttcgctaaggggcaccacgggaagcccaaccttcatacgctctactggacgggcctattcagccccgaaaatctggccaagacctccatcaagctgaacggccaagcggagctgttctacagacccaagagccggatgaagcggatggcccacaggctcggcgagaaaatgcttaacaaaaagttgaaggaccagaaaacccctatccccgacaccctctaccaggaactgtacgactacgtgaaccacaggctctcgcacgacctttccgacgaggcccgtgccctactcccgaacgtcattaccaaagaggtttcgcacgagatcatcaaggaccggcggttcacgagcgacaagtttttctttcacgtccccatcacccttaactaccaggcggccaactccccatccaagttcaaccagcgtgtgaatgcctacctcaaggagcacccagagaccccgatcattgggatcgaccggggcgagcggaacctgatctacatcaccgtcatcgactcgacgggcaagattcttgagcagagatcgttgaataccatacagcagttcgactaccagaagaaactcgacaaccgcgagaaggagcgcgtggcggcccgccaggcgtggtccgtcgttgggacgattaaggacttgaaacaaggttatctgtcccaagtcatccacgagatcgttgatctgatgatccactatcaggcagtggtggtgctggagaatctcaacttcggcttcaagagtaagcggacgggaatcgccgagaaggccgtgtaccagcagttcgagaagatgctgatcgacaagctcaactgccttgtgctgaaagactacccggccgagaaggtcggcggcgtcctcaacccgtaccaacttaccgaccagttcacctccttcgccaagatgggcactcagtccgggttcttgttctacgtccccgcaccttacacctctaagatcgaccctctgactggcttcgtagatccattcgtgtggaagaccattaagaaccacgagagccgcaagcacttcctggagggcttcgacttcctgcactacgacgtgaagaccggggacttcatccttcacttcaagatgaaccggaacctcagcttccagcggggcctgccggggttcatgcccgcctgggacatcgtgttcgagaagaacgagacccagttcgacgcgaagggcacgcccttcatcgccgggaagcgtatcgtgccggtgatcgagaaccatcgtttcacgggtcgctaccgtgacctctacccggcgaacgagcttatcgcactcctggaggagaagggcatcgtcttccgggacggctccaacatcctcccgaaactgctggaaaacgacgactctcacgccatcgacacgatggtggccctcatccggtccgtgctccaaatgcggaacagcaacgccgccaccggtgaggactacatcaacagcccggtccgggatctgaacggggtgtgcttcgattcgcggttccagaatcctgagtggccgatggacgcggatgcaaacggggcgtaccacatcgcgctcaagggccagttacttctgaaccaccttaaggagtctaaagatttgaaactccagaacgggatctcgaaccaggactggctggcctacatccaagagttgcggaacggcagcaagaagcggcggattaagcaagattag

SEQ ID NO: 36-38 - skipped (3 entries)

SEQ ID NO: 39 - protein, 24 aa, synthetic construct
  REGION 1..24: note = GCN4 sequence
EELLSKNYHLENEVARLKKGSGSG

SEQ ID NO: 40 - protein, 241 aa, synthetic construct
  REGION 1..241: note = GCN4 sequence
EEELLSKNYHLENEVARLKKGSGSGEELLSKNYHLENEVARLKKGSGSGEELLSKNYHLENEVARLKKGSGSGEELLSKNYHLENEVARLKKGSGSGEELLSKNYHLENEVARLKKGSGSGEELLSKNYHLENEVARLKKGSGSGEELLSKNYHLENEVARLKKGSGSGEELLSKNYHLENEVARLKKGSGSGEELLSKNYHLENEVARLKKGSGSGEELLSKNYHLENEVARLKKGSGSG

SEQ ID NO: 41 - protein, 277 aa, synthetic construct
  REGION 1..277: note = ScFv antibody
MGPDIVMTQSPSSLSASVGDRVTITCRSSTGAVTTSNYASWVQEKPGKLFKGLIGGTNNRAPGVPSRFSGSLIGDKATLTISSLQPEDFATYFCALWYSNHWVFGQGTKVELKRGGGGSGGGGSGGGGSSGGGSEVKLLESGGGLVQPGGSLKLSCAVSGFSLTDYGVNWVRQAPGRGLEWIGVIWGDGITDYNSALKDRFIISKDNGKNTVYLQMSKVRSDDTALYYCVTGLFDYWGQGTLVTVSSYPYDVPDYAGGGGGSGGGGSGGGGSGGGGS

SEQ ID NO: 42 - DNA, 66 bp, Saccharomyces bayanus
  source 1..66: mol_type = genomic DNA; note = Saccharomyces bayanus
ttcttgtcgtacttatagatcgctacgttatttcaattttgaaaatctgagtcctgggagtgcgga

SEQ ID NO: 43 - protein, 609 aa, Homo sapiens [sequence omitted]

SEQ ID NO: 44 - protein, 482 aa, synthetic construct
  REGION 1..482: note = polypeptide
MVRSGNKAAWLCMDVGFTMSNSIPGIESPFEQAKKVITMFVQRQVFAENKDEIALVLFGTDGTDNPLSGGDQYQNITVHRHLMLPDFDLLEDIESKIQPGSQQADFLDALIVSMDVIQHETIGKKFEKRHIEIFTDLSSRFSKSQLDIIIHSLKKCDISERHSIHWPCRLTIGSNLSIRIAAYKSILQERVKKTTWDAKTLKKEDIQKETVYCLNDDDETEVLKEDIIQGFRYGSDIVPFSKVDEEQMKYKSEGKCFSVLGFCKSSQVQRRFFMGNQVLKVFAARDDEAAAVALSSLIHALDDLDIWAIVRYAYDKRANPQVGVAFPHIKHNYECLVYVQLPFMEDLRQYMFSSLKNSKKYAPTEAQLNAVDALIDSMSLAKKDEKTDTLEDLFPTTKIPNPRFQRLFQCLLHRALHPREPLPPIQQHIWNMLNPPAEVTTKSQIPLSKIKTLFPLIEAKKKDQVTAQEIFQDNHEDGPTAK

SEQ ID NO: 45 - DNA, 10 bp, Methanobacterium thermoautotrophicum
  source 1..10: mol_type = genomic DNA
aatttttgga

SEQ ID NO: 46 - protein, 83 aa, Methanobacterium thermoautotrophicum
GSVIDVSSQRVNVQRPLDALGNSLNSPVIIKLKGDREFRGVLKSFDLHMNLVLNDAEELEDGEVTRRLGTVLIRGDNIVYISP

SEQ ID NO: 47 - DNA, 25 bp, Emesvirus zinderi
  source 1..25: mol_type = other DNA
gcgcacatgaggatcacccatgtgc

SEQ ID NO: 48 - protein, 116 aa, Emesvirus zinderi
MASNFTQFVLVDNGGTGDVTVAPSNFANGIAEISSNSRSQAYKVTCSVRQSSAQNRKYTIKVEVPKGAWRSYLNMELTIPIFATNSDCELIVKAMQGLLKDGNPIPSAIAANSGIY

SEQ ID NO: 49 - DNA, 26 bp, Pepevirus rubrum
  source 1..26: mol_type = genomic DNA
ataaggagtttatatggaaaccctta

SEQ ID NO: 50 - protein, 127 aa, Pepevirus rubrum
MSKTIVLSVGEATRTLTEIQSTADRQIFEEKVGPLVGRLRLTASLRQNGAKTAYRVNLKLDQADWDCSTSVCGELPKVRYTQVWSHDVTIVANSTEASRKSLYDLTKSLVATSQVEDLVVNLVPLGR

SEQ ID NO: 51 - DNA, 19 bp, Shigella flexneri
  source 1..19: mol_type = genomic DNA
ctgaatgcctgcgagcatc

SEQ ID NO: 52 - protein, 62 aa, Shigella flexneri
MKSIRCKNCNKLLFKADSFDHIEIRCPRCKRHIIMLNACEHPTEKHCGKREKITHSDETVRY

SEQ ID NO: 53 - DNA, 35 bp, synthetic construct
  misc_feature 1..35: note = Synthetic BbaJ23119 promoter to drive transcription / translation in gram negative bacteria
  source 1..35: mol_type = other DNA
ttgacagctagctcagtcctaggtataatgctagc

SEQ ID NO: 54 - DNA, 53 bp, synthetic construct
  misc_feature 1..53: note = Synthetic BbaJ23102 promoter to drive transcription / translation in gram negative bacteria
  source 1..53: mol_type = other DNA
ttgacagctagctcagtcctaggtactgtgctagcgctagcaaagaggagaaa

SEQ ID NO: 55 - DNA, 36 bp, unidentified
  source 1..36: mol_type = genomic DNA; note = Lachnospiraceae bacterium ND2006
gtttcaaagattaaataatttctactaagtgtagat

SEQ ID NO: 56 - DNA, 21 bp, unidentified
  source 1..21: mol_type = other DNA; note = Lachnospiraceae bacterium ND2006
taatttctactaagtgtagat

SEQ ID NO: 57 - DNA, 48 bp, unidentified
  source 1..48: mol_type = other DNA; note = Phage T7
ctagcataaccccttggggcctctaaacgggtcttgaggggttttttg

SEQ ID NO: 58 - DNA, 532 bp, unidentified
  source 1..532: mol_type = genomic DNA; note = Agrobacterium tumefaciens
ggagactcgaccagggtaatcagcacgtctgttcggcgcgcctatagctatggtttctcgcaatcgctttgggcagtcggttgtggcggtgcgtcttctgagacccgaaggttggcgattatctgctggaggtcttcgataccgtcttcgaagaacaagacatatgttcgctgagctcggacataggatagtcggcataggcggataccctcgccacgcaaatggcgcgatcgacaccctgatcggagcctgcgaagtgccacagtttattggaaccatcccccgttcattccgccctggaatttcacttcgacggcattctagatcctcgccgttgtcttagagagccatctttcgtcggcgcacccttaagtgcatggaaagccgttttcgcttcaaatgaaatcgaaaagaagaaaacaaaaatcctagagtaaccgaccctcccgataatcgtgaacatcagatgacagcatttcttccgaccgaagtggctgtgttggttatgagcttggggagatggggaggtacc

SEQ ID NO: 59 - DNA, 23 bp, Saccharomyces cerevisiae
  source 1..23: mol_type = genomic DNA
tttactaaaaacacatgtggata

SEQ ID NO: 60 - DNA, 23 bp, Saccharomyces cerevisiae
  source 1..23: mol_type = genomic DNA
gcggcttaactgtgccctccatg

SEQ ID NO: 61 - DNA, 23 bp, synthetic construct
  source 1..23: mol_type = other DNA; note = Nicotiana benthamiana
tgccgttaatttgagagtccaag

SEQ ID NO: 62 - DNA, 23 bp, synthetic construct
  source 1..23: mol_type = other DNA; note = Nicotiana benthamiana
agttcccaacgaagacctcgagc

SEQ ID NO: 63 - DNA, 23 bp, Arabidopsis thaliana
  source 1..23: mol_type = genomic DNA
tatgtcaatggccgtcgacatgt

SEQ ID NO: 64 - DNA, 23 bp, Arabidopsis thaliana
  source 1..23: mol_type = genomic DNA
gtgggttgtttggaagacatgtc

SEQ ID NO: 65 - DNA, 5187 bp, synthetic construct
  misc_feature 1..5187: note = Lachnospiraceae bacterium ND2006 (Cas12a), Agrobacterium tumefaciens (VirD2) fusion
  source 1..5187: mol_type = other DNA
atgagcggctccaagaagcgccgcatcaagcaagattcaaagctggagaagttcaccaactgctactcgctgagcaagacgctgcggttcaaggccatccccgtgggcaagacccaggagaacatcgacaacaagcgcctcctggtcgaggacgagaagcgcgccgaggactacaagggcgtcaagaagctcctggaccggtattacctcagcttcatcaacgacgtgctgcactcgatcaagctcaagaacctgaacaactacatcagcctgttccgcaagaaaacgcgcaccgagaaggagaacaaagagctggagaacctggagatcaacctgcggaaggagattgcgaaagctttcaagggcaacgagggctacaagtcgctcttcaagaaagacataatcgagaccatcctgccggagttcctggacgacaaggacgagatcgcgctcgtcaactcgttcaacgggttcactacggccttcacgggtttcttcgataaccgggagaatatgtttagcgaggaggccaagtccacctccattgcgttccgctgcatcaacgagaacctgacccgctacatcagcaacatggacatcttcgagaaggtggacgccatcttcgacaagcacgaggtccaggagatcaaggagaagattctgaactcggactacgacgtggaagacttcttcgagggcgagtttttcaacttcgtcctgacccaggaggggatcgacgtttataacgccatcatcggcgggttcgtcacggagtcgggcgaaaagatcaagggcctgaacgagtatattaacctgtacaaccagaagacaaagcagaagctgccgaagttcaagccgctgtacaagcaagtcctgtccgaccgcgagtcgctgtcgttctacggcgaaggctacacctcggacgaggaggtgctggaggtgttccgcaacaccctgaacaagaatagcgaaatttttagctccattaagaagctcgagaagctgttcaagaacttcgacgagtacagcagcgccgggatcttcgtcaagaacggccccgcgatcagcaccatctcgaaggacatcttcggcgagtggaacgtcatccgggacaagtggaacgccgagtacgacgacattcaccttaaaaagaaggctgttgtgacggagaagtacgaggacgaccggcgcaagtcgttcaaaaagatcggctccttctccctggagcagctccaggagtacgccgacgccgacctctcggtcgtcgagaagctcaaggagatcatcattcagaaggtggacgaaatttacaaagtgtacggctccagcgagaagctgttcgacgccgacttcgtgctggaaaagtcgctcaagaaaaacgacgccgtggtggccatcatgaaggacttgctggacagcgtgaagtcgttcgagaactacattaaggcgttctttggcgagggcaaggagaccaaccgcgacgagtcgttctacggcgacttcgtgctcgcgtacgacatcctgctcaaggtggatcacatctacgacgcgatccgcaactacgtcacgcagaagccgtactcgaaggacaagttcaagctgtacttccagaacccgcagttcatgggcgggtgggacaaggacaaggaaacggactaccgcgcgaccatcctgcggtacggcagcaagtattatctggcgatcatggacaaaaaatatgccaagtgcctccagaaaatcgacaaggacgacgtgaacggcaactacgagaagattaattacaagctgctccccggccccaacaagatgctcccgaaggtgttctttagcaagaagtggatggcctactacaacccgagcgaggacatccagaagatctataagaatggcaccttcaagaagggagacatgtttaacctcaacgactgccacaagctgattgacttcttcaaggactcgatctcgcgctacccgaagtggtcgaacgcctacgacttcaacttcagcgaaacggagaaatacaaagacatcgcgggcttctaccgcgaggtcgaggagcaaggctacaaggtcagcttcgagtccgccagcaagaaggaggtggacaagctggtggaggagggcaagctctacatgtttcagatctacaacaaggattttagcgacaagtcgcacggcacgccgaacctgcacacgatgtacttcaagctgctgttcgacgagaacaaccacggccagatccggctgtcgggcggtgcggagctgttcatgcgccgggcgtcgctcaagaaggaagagctggtcgtccacccggccaacagccccatcgccaacaagaaccccgacaaccccaagaaaacgacgacactcagctatgatgtctataaagacaagcgcttctcggaggaccagtacgagctgcacatccccatcgccatcaacaagtgccccaagaacatcttcaagatcaacacggaggtccgcgtgctcctcaagcacgacgacaacccgtacgtcatcggcatcgaccggggcgagcgcaacctgctgtacatcgtcgtcgtcgatggcaagggcaacatcgtggagcagtattccctgaacgagatcatcaacaacttcaacggcatccgcatcaagaccgactaccactccctcctcgacaagaaggagaaagagcgcttcgaggcccgccagaactggacctccatcgagaacatcaaggagcttaaggcgggctacatctcccaagtcgtccacaagatctgcgagctggtcgagaagtacgacgcggtgatcgccctggaagacctgaactccggcttcaagaactcccgcgtaaaggtggagaagcaagtgtaccagaagttcgagaagatgctgatcgacaagctgaactacatggtggacaagaaatcgaacccgtgcgcgaccggcggcgcgctcaagggctaccagatcacgaacaagttcgagtcgttcaagtccatgagcacgcagaacggctttatcttctacatcccggcctggctgacgtcgaagatcgacccctcgaccggcttcgtgaacctgctcaagaccaagtatactagcattgccgactccaagaaattcatctcgtccttcgaccgcatcatgtacgtcccggaggaggacctttttgagttcgccctcgactacaagaacttcagccgcaccgacgccgactacatcaagaagtggaagctgtactcgtacgggaaccgcatccgtatttttcgcaacccgaagaaaaataatgtcttcgactgggaggaggtgtgcctgaccagcgcctacaaggagctgttcaacaagtacggcatcaactaccaacagggcgacatccgggcccttctctgcgagcagagcgacaaggcgttctactcgtcgttcatggccctgatgagcctgatgctccagatgaggaacagcatcaccggccgcaccgacgtggacttcctcatcagccccgtcaagaactcggacggcatattttatgactcgcggaactacgaggcccaggagaacgccatcctgcccaagaacgccgacgccaacggcgcgtacaacatcgcccgcaaggtgctctgggccatcggccagttcaagaaggcggaagacgagaagctggacaaggtgaagatcgccatctccaacaaggagtggctggagtacgcgcagacgtccgtcaagcacggctccaagaaacggcggatcaaacaagattccggtggaagttccggaggttcaagcgggtctgaaacgccgggcaccagcgagtcggcgaccccggaaagcagcggtggttcttccggcggtagcatgcccgatcgagctcaagttatcattcgcattgtgccgggaggtggcaccaagacccttcaacaaattatcaatcagttggagtatctatcccggaagggcaggctggagctgcagcgttcagcccgacatctcgatattcccctgccaccggatcaaatccacgaacttgcccgaagctgggttcaagagactggaacttatgacgaaagtcagccagacgaggaaaggcaacaggagttgaccacccatattattgtaagcttccccgccggtacaagccaggtagcggcttatgcggcgagccgggagtgggcagccgagatgtttgggtcaggcgcaggggggggccgatacaactatcttacggccttccacatcgatcgcgaccacccacatctgcatgtcgtcgtcaatcggcgcgaacttttaggacacggctggctgaagatatctcggcgccatccccaactgaattacgacgccctgcgcataaagatggccgagatttcacttcgtcatggcattgccctcgatgcgagccgacgagcagaacgtggcatcaccgagcggccgatcacttatgcccaatatcggcgccttgagcgggagcaggctcgccaaatccgtttcgaagacgcggatttggaacagtcgtcgccgcaaggagatcatccagaattcagccaacctttcgatacatccccatttgaagcatccgcgggcggaccggaggacatgcctcggcccaacaatcggcagaatgagtcgcaagttcatctccaggagccagctggtgtcagcaacgaagccggtgtccttgtgcgggttgcattggaaacggagcgccttgctcaaccattcgtttccgaaaccattctcgcggacgacatagggagcggctcttcgcgtgttgccgagggccgtgtggagagcgcaaaccgcactcccgatattcctcgcgcagcaactgaagctgccacgcacacgacacacgaccggcagcggcgtgcaaagcgtcctcatgatgacgacggagggccgagtggagcaaaacgtgtgacattggaaggcatcgcggttgggccccaggcgaacgccggcgaacaggatggcagtagtggccccttagtacggcaagctggaacgtcacggccatctccaccgacggccacgacgcgggccagcaccgcaaccgattcattgtctgctacagcccacctccagcaacggagaggtgtcctttcaaagcgtccgcgtgaagatgatgatggagaaccgagtgaacgcaaacgcgagagagatgagcgcagcaaggacgggcgtgggggaaataggagatag

SEQ ID NO: 66 - protein, 1728 aa, synthetic construct
  REGION 1..1728: note = Lachnospiraceae bacterium ND2006 (Cas12a), Agrobacterium tumefaciens (VirD2) fusion
MSGSKKRRIKQDSKLEKFTNCYSLSKTLRFKAIPVGKTQENIDNKRLLVEDEKRAEDYKGVKKLLDRYYLSFINDVLHSIKLKNLNNYISLFRKKTRTEKENKELENLEINLRKEIAKAFKGNEGYKSLFKKDIIETILPEFLDDKDEIALVNSFNGFTTAFTGFFDNRENMFSEEAKSTSIAFRCINENLTRYISNMDIFEKVDAIFDKHEVQEIKEKILNSDYDVEDFFEGEFFNFVLTQEGIDVYNAIIGGFVTESGEKIKGLNEYINLYNQKTKQKLPKFKPLYKQVLSDRESLSFYGEGYTSDEEVLEVFRNTLNKNSEIFSSIKKLEKLFKNFDEYSSAGIFVKNGPAISTISKDIFGEWNVIRDKWNAEYDDIHLKKKAVVTEKYEDDRRKSFKKIGSFSLEQLQEYADADLSVVEKLKEIIIQKVDEIYKVYGSSEKLFDADFVLEKSLKKNDAVVAIMKDLLDSVKSFENYIKAFFGEGKETNRDESFYGDFVLAYDILLKVDHIYDAIRNYVTQKPYSKDKFKLYFQNPQFMGGWDKDKETDYRATILRYGSKYYLAIMDKKYAKCLQKIDKDDVNGNYEKINYKLLPGPNKMLPKVFFSKKWMAYYNPSEDIQKIYKNGTFKKGDMFNLNDCHKLIDFFKDSISRYPKWSNAYDFNFSETEKYKDIAGFYREVEEQGYKVSFESASKKEVDKLVEEGKLYMFQIYNKDFSDKSHGTPNLHTMYFKLLFDENNHGQIRLSGGAELFMRRASLKKEELVVHPANSPIANKNPDNPKKTTTLSYDVYKDKRFSEDQYELHIPIAINKCPKNIFKINTEVRVLLKHDDNPYVIGIDRGERNLLYIVVVDGKGNIVEQYSLNEIINNFNGIRIKTDYHSLLDKKEKERFEARQNWTSIENIKELKAGYISQVVHKICELVEKYDAVIALEDLNSGFKNSRVKVEKQVYQKFEKMLIDKLNYMVDKKSNPCATGGALKGYQITNKFESFKSMSTQNGFIFYIPAWLTSKIDPSTGFVNLLKTKYTSIADSKKFISSFDRIMYVPEEDLFEFALDYKNFSRTDADYIKKWKLYSYGNRIRIFRNPKKNNVFDWEEVCLTSAYKELFNKYGINYQQGDIRALLCEQSDKAFYSSFMALMSLMLQMRNSITGRTDVDFLISPVKNSDGIFYDSRNYEAQENAILPKNADANGAYNIARKVLWAIGQFKKAEDEKLDKVKIAISNKEWLEYAQTSVKHGSKKRRIKQDSGGSSGGSSGSETPGTSESATPESSGGSSGGSMPDRAQVIIRIVPGGGTKTLQQIINQLEYLSRKGRLELQRSARHLDIPLPPDQIHELARSWVQETGTYDESQPDEERQQELTTHIIVSFPAGTSQVAAYAASREWAAEMFGSGAGGGRYNYLTAFHIDRDHPHLHVVVNRRELLGHGWLKISRRHPQLNYDALRIKMAEISLRHGIALDASRRAERGITERPITYAQYRRLEREQARQIRFEDADLEQSSPQGDHPEFSQPFDTSPFEASAGGPEDMPRPNNRQNESQVHLQEPAGVSNEAGVLVRVALETERLAQPFVSETILADDIGSGSSRVAEGRVESANRTPDIPRAATEAATHTTHDRQRRAKRPHDDDGGPSGAKRVTLEGIAVGPQANAGEQDGSSGPLVRQAGTSRPSPPTATTRASTATDSLSATAHLQQRRGVLSKRPREDDDGEPSERKRERDERSKDGRGGNRR

SEQ ID NO: 67 - DNA, 636 bp, synthetic construct
  misc_feature 1..636: note = Agrobacterium tumefaciens, Bacteriophage MS2 (MCP) fusion
  source 1..636: mol_type = other DNA
atgagcgggtccaagaagcgccgcatcaagcaggacgccagcaatttcactcaattcgtcctggtcgacaacggcggtacgggtgatgtcaccgtagccccctcgaattttgccaatggagtggcggaatggatctccagcaactcgcggtcccaagcgtataaagtgacctgctccgtccgccagtcatcggcccagaagcggaagtacaccatcaaggtcgaggttcccaaagttgcgacgcagaccgtgggcggcgttgaactgccggtggcggcctggcgcagctacctgaacatggaactcaccatcccgatattcgcaacgaactccgactgcgaattgatcgtcaaggcgatgcagggcctcctcaaggatggaaatccgatcccgtccgctattgccgcgaactccggcatttattctgctggtagcaagaagcgtcggatcaaacaggattcgggcggcagcagtggtggctcttcggccagcctcgccagaggcggccctaacgcagtgggccttctgacgacaaacgaatccttcgagaaaaatatcaatgaggtctataaccgcacccgagcggagctggatgcctcatcgcgtgaccgctcgcgcagcgggctttcgaggtaa

SEQ ID NO: 68 - protein, 211 aa, synthetic construct
  REGION 1..211: note = Agrobacterium tumefaciens, Bacteriophage MS2 (MCP) fusion
MSGSKKRRIKQDASNFTQFVLVDNGGTGDVTVAPSNFANGVAEWISSNSRSQAYKVTCSVRQSSAQKRKYTIKVEVPKVATQTVGGVELPVAAWRSYLNMELTIPIFATNSDCELIVKAMQGLLKDGNPIPSAIAANSGIYSAGSKKRRIKQDSGGSSGGSSASLARGGPNAVGLLTTNESFEKNINEVYNRTRAELDASSRDRSRSGLSR

SEQ ID NO: 69 - DNA, 5289 bp, synthetic construct
  misc_feature 1..5289: note = Lachnospiraceae bacterium ND2006 (Cas12a), Agrobacterium tumefaciens fusion
  source 1..5289: mol_type = other DNA
atgcccgatcgagctcaagttatcattcgcattgtgccgggaggtggcaccaagacccttcaacaaattatcaatcagttggagtatctatcccggaagggcaggctggagctgcagcgttcagcccgacatctcgatattcccctgccaccggatcaaatccacgaacttgcccgaagctgggttcaagagactggaacttatgacgaaagtcagccagacgaggaaaggcaacaggagttgaccacccatattattgtaagcttccccgccggtacaagccaggtagcggcttatgcggcgagccgggagtgggcagccgagatgtttgggtcaggcgcaggggggggccgatacaactatcttacggccttccacatcgatcgcgaccacccacatctgcatgtcgtcgtcaatcggcgcgaacttttaggacacggctggctgaagatatctcggcgccatccccaactgaattacgacgccctgcgcataaagatggccgagatttcacttcgtcatggcattgccctcgatgcgagccgacgagcagaacgtggcatcaccgagcggccgatcacttatgcccaatatcggcgccttgagcgggagcaggctcgccaaatccgtttcgaagacgcggatttggaacagtcgtcgccgcaaggagatcatccagaattcagccaacctttcgatacatccccatttgaagcatccgcgggcggaccggaggacatgcctcggcccaacaatcggcagaatgagtcgcaagttcatctccaggagccagctggtgtcagcaacgaagccggtgtccttgtgcgggttgcattggaaacggagcgccttgctcaaccattcgtttccgaaaccattctcgcggacgacatagggagcggctcttcgcgtgttgccgagggccgtgtggagagcgcaaaccgcactcccgatattcctcgcgcagcaactgaagctgccacgcacacgacacacgaccggcagcggcgtgcaaagcgtcctcatgatgacgacggagggccgagtggagcaaaacgtgtgacattggaaggcatcgcggttgggccccaggcgaacgccggcgaacaggatggcagtagtggccccttagtacggcaagctggaacgtcacggccatctccaccgacggccacgacgcgggccagcaccgcaaccgattcattgtctgctacagcccacctccagcaacggagaggtgtcctttcaaagcgtccgcgtgaagatgatgatggagaaccgagtgaacgcaaacgcgagagagatgagcgcagcaaggacgggcgtgggggaaataggagaagcggtggctcctcgggtggcagcatgagcggctccaagaagcgccgcatcaagcaagattcaaagctggagaagttcaccaactgctactcgctgagcaagacgctgcggttcaaggccatccccgtgggcaagacccaggagaacatcgacaacaagcgcctcctggtcgaggacgagaagcgcgccgaggactacaagggcgtcaagaagctcctggaccggtattacctcagcttcatcaacgacgtgctgcactcgatcaagctcaagaacctgaacaactacatcagcctgttccgcaagaaaacgcgcaccgagaaggagaacaaagagctggagaacctggagatcaacctgcggaaggagattgcgaaagctttcaagggcaacgagggctacaagtcgctcttcaagaaagacataatcgagaccatcctgccggagttcctggacgacaaggacgagatcgcgctcgtcaactcgttcaacgggttcactacggccttcacgggtttcttcgataaccgggagaatatgtttagcgaggaggccaagtccacctccattgcgttccgctgcatcaacgagaacctgacccgctacatcagcaacatggacatcttcgagaaggtggacgccatcttcgacaagcacgaggtccaggagatcaaggagaagattctgaactcggactacgacgtggaagacttcttcgagggcgagtttttcaacttcgtcctgacccaggaggggatcgacgtttataacgccatcatcggcgggttcgtcacggagtcgggcgaaaagatcaagggcctgaacgagtatattaacctgtacaaccagaagacaaagcagaagctgccgaagttcaagccgctgtacaagcaagtcctgtccgaccgcgagtcgctgtcgttctacggcgaaggctacacctcggacgaggaggtgctggaggtgttccgcaacaccctgaacaagaatagcgaaatttttagctccattaagaagctcgagaagctgttcaagaacttcgacgagtacagcagcgccgggatcttcgtcaagaacggccccgcgatcagcaccatctcgaaggacatcttcggcgagtggaacgtcatccgggacaagtggaacgccgagtacgacgacattcaccttaaaaagaaggctgttgtgacggagaagtacgaggacgaccggcgcaagtcgttcaaaaagatcggctccttctccctggagcagctccaggagtacgccgacgccgacctctcggtcgtcgagaagctcaaggagatcatcattcagaaggtggacgaaatttacaaagtgtacggctccagcgagaagctgttcgacgccgacttcgtgctggaaaagtcgctcaagaaaaacgacgccgtggtggccatcatgaaggacttgctggacagcgtgaagtcgttcgagaactacattaaggcgttctttggcgagggcaaggagaccaaccgcgacgagtcgttctacggcgacttcgtgctcgcgtacgacatcctgctcaaggtggatcacatctacgacgcgatccgcaactacgtcacgcagaagccgtactcgaaggacaagttcaagctgtacttccagaacccgcagttcatgggcgggtgggacaaggacaaggaaacggactaccgcgcgaccatcctgcggtacggcagcaagtattatctggcgatcatggacaaaaaatatgccaagtgcctccagaaaatcgacaaggacgacgtgaacggcaactacgagaagattaattacaagctgctccccggccccaacaagatgctcccgaaggtgttctttagcaagaagtggatggcctactacaacccgagcgaggacatccagaagatctataagaatggcaccttcaagaagggagacatgtttaacctcaacgactgccacaagctgattgacttcttcaaggactcgatctcgcgctacccgaagtggtcgaacgcctacgacttcaacttcagcgaaacggagaaatacaaagacatcgcgggcttctaccgcgaggtcgaggagcaaggctacaaggtcagcttcgagtccgccagcaagaaggaggtggacaagctggtggaggagggcaagctctacatgtttcagatctacaacaaggattttagcgacaagtcgcacggcacgccgaacctgcacacgatgtacttcaagctgctgttcgacgagaacaaccacggccagatccggctgtcgggcggtgcggagctgttcatgcgccgggcgtcgctcaagaaggaagagctggtcgtccacccggccaacagccccatcgccaacaagaaccccgacaaccccaagaaaacgacgacactcagctatgatgtctataaagacaagcgcttctcggaggaccagtacgagctgcacatccccatcgccatcaacaagtgccccaagaacatcttcaagatcaacacggaggtccgcgtgctcctcaagcacgacgacaacccgtacgtcatcggcatcgaccggggcgagcgcaacctgctgtacatcgtcgtcgtcgatggcaagggcaacatcgtggagcagtattccctgaacgagatcatcaacaacttcaacggcatccgcatcaagaccgactaccactccctcctcgacaagaaggagaaagagcgcttcgaggcccgccagaactggacctccatcgagaacatcaaggagcttaaggcgggctacatctcccaagtcgtccacaagatctgcgagctggtcgagaagtacgacgcggtgatcgccctggaagacctgaactccggcttcaagaactcccgcgtaaaggtggagaagcaagtgtaccagaagttcgagaagatgctgatcgacaagctgaactacatggtggacaagaaatcgaacccgtgcgcgaccggcggcgcgctcaagggctaccagatcacgaacaagttcgagtcgttcaagtccatgagcacgcagaacggctttatcttctacatcccggcctggctgacgtcgaagatcgacccctcgaccggcttcgtgaacctgctcaagaccaagtatactagcattgccgactccaagaaattcatctcgtccttcgaccgcatcatgtacgtcccggaggaggacctttttgagttcgccctcgactacaagaacttcagccgcaccgacgccgactacatcaagaagtggaagctgtactcgtacgggaaccgcatccgtatttttcgcaacccgaagaaaaataatgtcttcgactgggaggaggtgtgcctgaccagcgcctacaaggagctgttcaacaagtacggcatcaactaccaacagggcgacatccgggcccttctctgcgagcagagcgacaaggcgttctactcgtcgttcatggccctgatgagcctgatgctccagatgaggaacagcatcaccggccgcaccgacgtggacttcctcatcagccccgtcaagaactcggacggcatattttatgactcgcggaactacgaggcccaggagaacgccatcctgcccaagaacgccgacgccaacggcgcgtacaacatcgcccgcaaggtgctctgggccatcggccagttcaagaaggcggaagacgagaagctggacaaggtgaagatcgccatctccaacaaggagtggctggagtacgcgcagacgtccgtcaagcacggctccaagaaacggcggatcaaacaagattccggtggcagttccggtggcagcagtgcgtcgttagcaagaggcggtccaaatgcagtgggactcctaacgacgaacgaaagctttgagaaaaatatcaatgaggtctacaaccgtacgcgagccgagctagacgcttcttcacgtgacagaagtcgctctggactatcgcgataa

SEQ ID NO: 70 - protein, 1762 aa, synthetic construct
  REGION 1..1762: note = Lachnospiraceae bacterium ND2006 (Cas12a), Agrobacterium tumefaciens
MPDRAQVIIRIVPGGGTKTLQQIINQLEYLSRKGRLELQRSARHLDIPLPPDQIHELARSWVQETGTYDESQPDEERQQELTTHIIVSFPAGTSQVAAYAASREWAAEMFGSGAGGGRYNYLTAFHIDRDHPHLHVVVNRRELLGHGWLKISRRHPQLNYDALRIKMAEISLRHGIALDASRRAERGITERPITYAQYRRLEREQARQIRFEDADLEQSSPQGDHPEFSQPFDTSPFEASAGGPEDMPRPNNRQNESQVHLQEPAGVSNEAGVLVRVALETERLAQPFVSETILADDIGSGSSRVAEGRVESANRTPDIPRAATEAATHTTHDRQRRAKRPHDDDGGPSGAKRVTLEGIAVGPQANAGEQDGSSGPLVRQAGTSRPSPPTATTRASTATDSLSATAHLQQRRGVLSKRPREDDDGEPSERKRERDERSKDGRGGNRRSGGSSGGSMSGSKKRRIKQDSKLEKFTNCYSLSKTLRFKAIPVGKTQENIDNKRLLVEDEKRAEDYKGVKKLLDRYYLSFINDVLHSIKLKNLNNYISLFRKKTRTEKENKELENLEINLRKEIAKAFKGNEGYKSLFKKDIIETILPEFLDDKDEIALVNSFNGFTTAFTGFFDNRENMFSEEAKSTSIAFRCINENLTRYISNMDIFEKVDAIFDKHEVQEIKEKILNSDYDVEDFFEGEFFNFVLTQEGIDVYNAIIGGFVTESGEKIKGLNEYINLYNQKTKQKLPKFKPLYKQVLSDRESLSFYGEGYTSDEEVLEVFRNTLNKNSEIFSSIKKLEKLFKNFDEYSSAGIFVKNGPAISTISKDIFGEWNVIRDKWNAEYDDIHLKKKAVVTEKYEDDRRKSFKKIGSFSLEQLQEYADADLSVVEKLKEIIIQKVDEIYKVYGSSEKLFDADFVLEKSLKKNDAVVAIMKDLLDSVKSFENYIKAFFGEGKETNRDESFYGDFVLAYDILLKVDHIYDAIRNYVTQKPYSKDKFKLYFQNPQFMGGWDKDKETDYRATILRYGSKYYLAIMDKKYAKCLQKIDKDDVNGNYEKINYKLLPGPNKMLPKVFFSKKWMAYYNPSEDIQKIYKNGTFKKGDMFNLNDCHKLIDFFKDSISRYPKWSNAYDFNFSETEKYKDIAGFYREVEEQGYKVSFESASKKEVDKLVEEGKLYMFQIYNKDFSDKSHGTPNLHTMYFKLLFDENNHGQIRLSGGAELFMRRASLKKEELVVHPANSPIANKNPDNPKKTTTLSYDVYKDKRFSEDQYELHIPIAINKCPKNIFKINTEVRVLLKHDDNPYVIGIDRGERNLLYIVVVDGKGNIVEQYSLNEIINNFNGIRIKTDYHSLLDKKEKERFEARQNWTSIENIKELKAGYISQVVHKICELVEKYDAVIALEDLNSGFKNSRVKVEKQVYQKFEKMLIDKLNYMVDKKSNPCATGGALKGYQITNKFESFKSMSTQNGFIFYIPAWLTSKIDPSTGFVNLLKTKYTSIADSKKFISSFDRIMYVPEEDLFEFALDYKNFSRTDADYIKKWKLYSYGNRIRIFRNPKKNNVFDWEEVCLTSAYKELFNKYGINYQQGDIRALLCEQSDKAFYSSFMALMSLMLQMRNSITGRTDVDFLISPVKNSDGIFYDSRNYEAQENAILPKNADANGAYNIARKVLWAIGQFKKAEDEKLDKVKIAISNKEWLEYAQTSVKHGSKKRRIKQDSGGSSGGSSASLARGGPNAVGLLTTNESFEKNINEVYNRTRAELDASSRDRSRSGLSR

SEQ ID NO: 71 - DNA, 1605 bp, synthetic construct
  misc_feature 1..1605: note = Agrobacterium tumefaciens (Vir), synthetic (SH3), Simian virus 40 (NLS) fusion
  source 1..1605: mol_type = other DNA
atgcccgatcgagctcaagttatcattcgcattgtgccgggaggtggcaccaagacccttcaacaaattatcaatcagttggagtatctatcccggaagggcaggctggagctgcagcgttcagcccgacatctcgatattcccctgccaccggatcaaatccacgaacttgcccgaagctgggttcaagagactggaacttatgacgaaagtcagccagacgaggaaaggcaacaggagttgaccacccatattattgtaagcttccccgccggtacaagccaggtagcggcttatgcggcgagccgggagtgggcagccgagatgtttgggtcaggcgcaggggggggccgatacaactatcttacggccttccacatcgatcgcgaccacccacatctgcatgtcgtcgtcaatcggcgcgaacttttaggacacggctggctgaagatatctcggcgccatccccaactgaattacgacgccctgcgcataaagatggccgagatttcacttcgtcatggcattgccctcgatgcgagccgacgagcagaacgtggcatcaccgagcggccgatcacttatgcccaatatcggcgccttgagcgggagcaggctcgccaaatccgtttcgaagacgcggatttggaacagtcgtcgccgcaaggagatcatccagaattcagccaacctttcgatacatccccatttgaagcatccgcgggcggaccggaggacatgcctcggcccaacaatcggcagaatgagtcgcaagttcatctccaggagccagctggtgtcagcaacgaagccggtgtccttgtgcgggttgcattggaaacggagcgccttgctcaaccattcgtttccgaaaccattctcgcggacgacatagggagcggctcttcgcgtgttgccgagggccgtgtggagagcgcaaaccgcactcccgatattcctcgcgcagcaactgaagctgccacgcacacgacacacgaccggcagcggcgtgcaaagcgtcctcatgatgacgacggagggccgagtggagcaaaacgtgtgacattggaaggcatcgcggttgggccccaggcgaacgccggcgaacaggatggcagtagtgggggctcctcgggtggcagcatgagcggatcaaaaaaaagaaggatcaagcaagatgcggagtacgtgcgtgctttgtttgatttcaacggcaacgatgaagaagacctgccattcaaaaagggcgacatcctgcgtattcgtgataaaccggaagagcagtggtggaatgcagaggacagcgaaggtaagcgcggtatgatcccggttccgtatgtcgagaagtactccggtagtggggggtcctctggtggaagtagtggccccttagtacggcaagctggaacgtcacggccatctccaccgacggccacgacgcgggccagcaccgcaaccgattcattgtctgctacagcccacctccagcaacggagaggtgtcctttcaaagcgtccgcgtgaagatgatgatggagaaccgagtgaacgcaaacgcgagagagatgagcgcagcaaggacgggcgtgggggaaataggagatag

SEQ ID NO: 72 - DNA, 23 bp, Glycine max
  source 1..23: mol_type = other DNA
tgtgtgatgttcgatgttggatt

SEQ ID NO: 73 - DNA, 23 bp, Glycine max
  source 1..23: mol_type = other DNA
ttgtaaccaacatcccctgatga

SEQ ID NO: 74 - DNA, 23 bp, Glycine max
  source 1..23: mol_type = other DNA
acacctactcatctggccattgt

SEQ ID NO: 75 - DNA, 96 bp, synthetic construct
  misc_feature 1..96: note = BE4 Linker Agrobacterium codon optimized nucleotide sequence
  source 1..96: mol_type = other DNA
tccggtggaagttccggaggttcaagcgggtctgaaacgccgggcaccagcgagtcggcgaccccggaaagcagcggtggttcttccggcggtagc

SEQ ID NO: 76 - protein, 32 aa, synthetic construct
  REGION 1..32: note = BE4 Linker amino acid sequence
SGGSSGGSSGSETPGTSESATPESSGGSSGGS

SEQ ID NO: 77 - DNA, 53 bp, Escherichia coli; identical to SEQ ID NO: 54
  source 1..53: mol_type = genomic DNA; note = constitutive J23102 promoter

SEQ ID NO: 78 - DNA, 129 bp, Escherichia coli
  source 1..129: mol_type = genomic DNA; note = T7 early terminator
ccaggcatcaaataaaacgaaaggctcagtcgaaagactgggcctttcgttttatctgttgtttgtcggtgaacgctctctactagagtcacactggctcaccttcgggtgggcctttctgcgtttata

SEQ ID NO: 79 - DNA, 10816 bp, synthetic construct
  misc_feature 1..10816: note = pWISE3104 Full plasmid sequence
  source 1..10816: mol_type = other DNA
cggtgcctaatgagtgagctaacttacattaattgcgttgcgccccgggatgagattatcaaaaaggatcttcacctagatccttttaaattaaaaatgaagttttaaatcaatctaaagtatatatgtgtaacattggtctagtgattggatccttgacagctagctcagtcctaggtactgtgctagcgctagcaaagaggagaaaggtaccatgagcggctccaagaagcgccgcatcaagcaagattcaaagctggagaagttcaccaactgctactcgctgagcaagacgctgcggttcaaggccatccccgtgggcaagacccaggagaacatcgacaacaagcgcctcctggtcgaggacgagaagcgcgccgaggactacaagggcgtcaagaagctcctggaccggtattacctcagcttcatcaacgacgtgctgcactcgatcaagctcaagaacctgaacaactacatcagcctgttccgcaagaaaacgcgcaccgagaaggagaacaaagagctggagaacctggagatcaacctgcggaaggagattgcgaaagctttcaagggcaacgagggctacaagtcgctcttcaagaaagacataatcgagaccatcctgccggagttcctggacgacaaggacgagatcgcgctcgtcaactcgttcaacgggttcactacggccttcacgggtttcttcgataaccgggagaatatgtttagcgaggaggccaagtccacctccattgcgttccgctgcatcaacgagaacctgacccgctacatcagcaacatggacatcttcgagaaggtggacgccatcttcgacaagcacgaggtccaggagatcaaggagaagattctgaactcggactacgacgtggaagacttcttcgagggcgagtttttcaacttcgtcctgacccaggaggggatcgacgtttataacgccatcatcggcgggttcgtcacggagtcgggcgaaaagatcaagggcctgaacgagtatattaacctgtacaaccagaagacaaagcagaagctgccgaagttcaagccgctgtacaagcaagtcctgtccgaccgcgagtcgctgtcgttctacggcgaaggctacacctcggacgaggaggtgctggaggtgttccgcaacaccctgaacaagaatagcgaaatttttagctccattaagaagctcgagaagctgttcaagaacttcgacgagtacagcagcgccgggatcttcgtcaagaacggccccgcgatcagcaccatctcgaaggacatcttcggcgagtggaacgtcatccgggacaagtggaacgccgagtacgacgacattcaccttaaaaagaaggctgttgtgacggagaagtacgaggacgaccggcgcaagtcgttcaaaaagatcggctccttctccctggagcagctccaggagtacgccgacgccgacctctcggtcgtcgagaagctcaaggagatcatcattcagaaggtggacgaaatttacaaagtgtacggctccagcgagaagctgttcgacgccgacttcgtgctggaaaagtcgctcaagaaaaacgacgccgtggtggccatcatgaaggacttgctggacagcgtgaagtcgttcgagaactacattaaggcgttctttggcgagggcaaggagaccaaccgcgacgagtcgttctacggcgacttcgtgctcgcgtacgacatcctgctcaaggtggatcacatctacgacgcgatccgcaactacgtcacgcagaagccgtactcgaaggacaagttcaagctgtacttccagaacccgcagttcatgggcgggtgggacaaggacaaggaaacggactaccgcgcgaccatcctgcggtacggcagcaagtattatctggcgatcatggacaaaaaatatgccaagtgcctccagaaaatcgacaaggacgacgtgaacggcaactacgagaagattaattacaagctgctccccggccccaacaagatgctcccgaaggtgttctttagcaagaagtggatggcctactacaacccgagcgaggacatccagaagatctataagaatggcaccttcaagaagggagacatgtttaacctcaacgactgccacaagctgattgacttcttcaaggactcgatctcgcgctacccgaagtggtcgaacgcctacgacttcaacttcagcgaaacggagaaatacaaagacatcgcgggcttctaccgcgaggtcgaggagcaaggctacaaggtcagcttcgagtccgccagcaagaaggaggtggacaagctggtggaggagggcaagctctacatgtttcagatctacaacaaggattttagcgacaagtcgcacggcacgccgaacctgcacacgatgtacttcaagctgctgttcgacgagaacaaccacggccagatccggctgtcgggcggtgcggagctgttcatgcgccgggcgtcgctcaagaaggaagagctggtcgtccacccggccaacagccccatcgccaacaagaaccccgacaaccccaagaaaacgacgacactcagctatgatgtctataaagacaagcgcttctcggaggaccagtacgagctgcacatccccatcgccatcaacaagtgccccaagaacatcttcaagatcaacacggaggtccgcgtgctcctcaagcacgacgacaacccgtacgtcatcggcatcgaccggggcgagcgcaacctgctgtacatcgtcgtcgtcgatggcaagggcaacatcgtggagcagtattccctgaacgagatcatcaacaacttcaacggcatccgcatcaagaccgactaccactccctcctcgacaagaaggagaaagagcgcttcgaggcccgccagaactggacctccatcgagaacatcaaggagcttaaggcgggctacatctcccaagtcgtccacaagatctgcgagctggtcgagaagtacgacgcggtgatcgccctggaagacctgaactccggcttcaagaactcccgcgtaaaggtggagaagcaagtgtaccagaagttcgagaagatgctgatcgacaagctgaactacatggtggacaagaaatcgaacccgtgcgcgaccggcggcgcgctcaagggctaccagatcacgaacaagttcgagtcgttcaagtccatgagcacgcagaacggctttatcttctacatcccggcctggctgacgtcgaagatcgacccctcgaccggcttcgtgaacctgctcaagaccaagtatactagcattgccgactccaagaaattcatctcgtccttcgaccgcatcatgtacgtcccggaggaggacctttttgagttcgccctcgactacaagaacttcagccgcaccgacgccgactacatcaagaagtggaagctgtactcgtacgggaaccgcatccgtatttttcgcaacccgaagaaaaataatgtcttcgactgggaggaggtgtgcctgaccagcgcctacaaggagctgttcaacaagtacggcatcaactaccaacagggcgacatccgggcccttctctgcgagcagagcgacaaggcgttctactcgtcgttcatggccctgatgagcctgatgctccagatgaggaacagcatcaccggccgcaccgacgtggacttcctcatcagccccgtcaagaactcggacggcatattttatgactcgcggaactacgaggcccaggagaacgccatcctgcccaagaacgccgacgccaacggcgcgtacaacatcgcccgcaaggtgctctgggccatcggccagttcaagaaggcggaagacgagaagctggacaaggtgaagatcgccatctccaacaaggagtggctggagtacgcgcagacgtccgtcaagcacggctccaagaaacggcggatcaaacaagattccggtggaagttccggaggttcaagcgggtctgaaacgccgggcaccagcgagtcggcgaccccggaaagcagcggtggttcttccggcggtagcatgcccgatcgagctcaagttatcattcgcattgtgccgggaggtggcaccaagacccttcaacaaattatcaatcagttggagtatctatcccggaagggcaggctggagctgcagcgttcagcccgacatctcgatattcccctgccaccggatcaaatccacgaacttgcccgaagctgggttcaagagactggaacttatgacgaaagtcagccagacgaggaaaggcaacaggagttgaccacccatattattgtaagcttccccgccggtacaagccaggtagcggcttatgcggcgagccgggagtgggcagccgagatgtttgggtcaggcgcaggggggggccgatacaactatcttacggccttccacatcgatcgcgaccacccacatctgcatgtcgtcgtcaatcggcgcgaacttttaggacacggctggctgaagatatctcggcgccatccccaactgaattacgacgccctgcgcataaagatggccgagatttcacttcgtcatggcattgccctcgatgcgagccgacgagcagaacgtggcatcaccgagcggccgatcacttatgcccaatatcggcgccttgagcgggagcaggctcgccaaatccgtttcgaagacgcggatttggaacagtcgtcgccgcaaggagatcatccagaattcagccaacctttcgatacatccccatttgaagcatccgcgggcggaccggaggacatgcctcggcccaacaatcggcagaatgagtcgcaagttcatctccaggagccagctggtgtcagcaacgaagccggtgtccttgtgcgggttgcattggaaacggagcgccttgctcaaccattcgtttccgaaaccattctcgcggacgacatagggagcggctcttcgcgtgttgccgagggccgtgtggagagcgcaaaccgcactcccgatattcctcgcgcagcaactgaagctgccacgcacacgacacacgaccggcagcggcgtgcaaagcgtcctcatgatgacgacggagggccgagtggagcaaaacgtgtgacattggaaggcatcgcggttgggccccaggcgaacgccggcgaacaggatggcagtagtggccccttagtacggcaagctggaacgtcacggccatctccaccgacggccacgacgcgggccagcaccgcaaccgattcattgtctgctacagcccacctccagcaacggagaggtgtcctttcaaagcgtccgcgtgaagatgatgatggagaaccgagtgaacgcaaacgcgagagagatgagcgcagcaaggacgggcgtgggggaaataggagatagtctagaccaggcatcaaataaaacgaaaggctcagtcgaaagactgggcctttcgttttatctgttgtttgtcggtgaacgctctctactagagtcacactggctcaccttcgggtgggcctttctgcgtttatagtacgatatcccaatggcgcgccgagcttggctcgagcatggtcatagctgtttcctgtgtgaaattgttatccgctcacaattccacacaacatacgagccggaagcataaagtgtaaagcctggggtgcctaatgagtgagctaactcacattaattgcgttgcgctcactgcccgctttccagtcgggaaacctgtcgtgccagctgcattaatgaatcggccaacgcgcggggagaggcggtttgcgtattgggcgctgttccgcttcctcgctcactgactcgctgcgctcggtcgttcggctgcggcgagcggtatcagctcactcaaaggcggtaatacggttatccacagaatcaggggataacgcaggaaagaacatgtgagcaaaaggccagcaaaaggccaggaaccgtaaaaaggccgcgttgctggcgtttttccataggctccgcccccctgacgagcatcacaaaaatcgacgctcaagtcagaggtggcgaaacccgacaggactataaagataccaggcgtttccccctggaagctccctcgtgcgctctcctgttccgaccctgccgcttaccggatacctgtccgcctttctcccttcgggaagcgtggcgctttctcatagctcacgctgtaggtatctcagttcggtgtaggtcgttcgctccaagctgggctgtgtgcacgaaccccccgttcagcccgaccgctgcgccttatccggtaactatcgtcttgagtccaacccggtaagacacgacttatcgccactggcagcagccactggtaacaggattagcagagcgaggtatgtaggcggtgctacagagttcttgaagtggtggcctaactacggctacactagaagaacagtatttggtatctgcgctctgctgaagccagttaccttcggaaaaagagttggtagctcttgatccggcaaacaaaccaccgctggtagcggtggtttttttgtttgcaagcagcagattacgcgcagaaaaaaaggatctcaagaagatcctttgatcttttctacggggtctgacgctcagtggaacgaaaactcacgttaagggattttggtcatgagattatcaaaaaggatcttcacctagatccttttaaattaaaaatgaagttttaaatcaatctaaagtatatatgagtaaacttggtctgacagttagaaaaactcatcgagcatcaaatgaaactgcaatttattcatatcaggattatcaataccatatttttgaaaaagccgtttctgtaatgaaggagaaaactcaccgaggcagttccataggatggcaagatcctggtatcggtctgcgattccgactcgtccaacatcaatacaacctattaatttcccctcgtcaaaaataaggttatcaagtgagaaatcaccatgagtgacgactgaatccggtgagaatggcaaaagtttatgcatttctttccagacttgttcaacaggccagccattacgctcgtcatcaaaatcactcgcatcaaccaaaccgttattcattcgtgattgcgcctgagcgaaacgaaatacgcgatcgctgttaaaaggacaattacaaacaggaatcgaatgcaaccggcgcaggaacactgccagcgcatcaacaatattttcacctgaatcaggatattcttctaatacctggaatgctgttttcccagggatcgcagtggtgagtaaccatgcatcatcaggagtacggataaaatgcttgatggtcggaagaggcataaattccgtcagccagtttagtctgaccatctcatctgtaacatcattggcaacgctacctttgccatgtttcagaaacaactctggcgcatcgggcttcccatacaatcgatagattgtcgcacctgattgcccgacattatcgcgagcccatttatacccatataaatcagcatccatgttggaatttaatcgcggcctagagcaagacgtttcccgttgaatatggctcatactcttcctttttcaatattattgaagcatttatcagggttattgtctcatgagcggatacatatttgaatgtatttagaaaaataaacaaataggggttccgcgcacatttccccgaaaagtgccacctgacgtctaagaaaccattattatcatgacattaacctataaaaataggcgtatcacgaggcccttttgtctcgcgcgtttcggtgatgacggtgaaaacctctgacacatgcagctcccggagactgtcacagcttgtctgtaagcggatgccgggagcagacaagcccgtcagggcgcgtcagcgggtgttggcgggtgtcggggctggcttaactatgcggcatcagagcagattgtactgagagtgcaccatatgcggtgtgaaataccgcacagatgcgtaaggagaaaataccgcatcaggcgccattcgccattcaggctgcgcaactgttgggaagggcgatcggtgcgggcctcttcgctattacgccagctggcgaaagggggatgtgctgcaaggcgattaagttgggtaacgccagggttttcccagtcacgacgttgtaaaacgacggccagtgaattgacgcgttgcggctgcatgaaatcctggccggtttgtctgatgccaagctggcggcctggccggccagcttggccgctgaagaaaccgagcgccgccgtctaaaaaggtgatgtgtatttgagtaaaacagcttgcgtcatgcggtcgctgcgtatatgatgcgatgagtaaataaacaaatacgcaaggggaacgcatgaaggttatcgctgtacttaaccagaaaggcgggtcaggcaagacgaccatcgcaacccatctagcccgcgccctgcaactcgccggggccgatgttctgttagtcgattccgatccccagggcagtgcccgcgattgggcggccgtgcgggaagatcaaccgctaaccgttgtcggcatcgaccgcccgacgattgaccgcgacgtgaaggccatcggccggcgcgacttcgtagtgatcgacggagcgccccaggcggcggacttggctgtgtccgcgatcaaggcagccgacttcgtgctgattccggtgcagccaagcccttacgacatatgggccaccgccgacctggtggagctggttaagcagcgcattgaggtcacggatggaaggctacaagcggcctttgtcgtgtcgcgggcgatcaaaggcacgcgcatcggcggtgaggttgccgaggcgctggccgggtacgagctgcccattcttgagtcccgtatcacgcagcgcgtgagctacccaggcactgccgccgccggcacaaccgttcttgaatcagaacccgagggcgacgctgcccgcgaggtccaggcgctggccgctgaaattaaatcaaaactcatttgagttaatgaggtaaagagaaaatgagcaaaagcacaaacacgctaagtgccggccgtccgagcgcacgcagcagcaaggctgcaacgttggccagcctggcagacacgccagccatgaagcgggtcaactttcagttgccggcggaggatcacaccaagctgaagatgtacgcggtacgccaaggcaagaccattaccgagctgctatctgaatacatcgcgcagctaccagagtaaatgagcaaatgaataaatgagtagatgaattttagcggctaaaggaggcggcatggaaaatcaagaacaaccaggcaccgacgccgtggaatgccccatgtgtggaggaacgggcggttggccaggcgtaagcggctgggttgtctgccggccctgcaatggcactggaacccccaagcccgaggaatcggcgtgagcggtcgcaaaccatccggcccggtacaaatcggcgcggcgctgggtgatgacctggtggagaagttgaaggccgcgcaggccgcccagcggcaacgcatcgaggcagaagcacgccccggtgaatcgtggcaagcggccgctgatcgaatccgcaaagaatcccggcaaccgccggcagccggtgcgccgtcgattaggaagccgcccaagggcgacgagcaaccagattttttcgttccgatgctctatgacgtgggcacccgcgatagtcgcagcatcatggacgtggccgttttccgtctgtcgaagcgtgaccgacgagctggcgaggtgatccgctacgagcttccagacgggcacgtagaggtttccgcagggccggccggcatggccagtgtgtgggattacgacctggtactgatggcggtttcccatctaaccgaatccatgaaccgataccgggaagggaagggagacaagcccggccgcgtgttccgtccacacgttgcggacgtactcaagttctgccggcgagccgatggcggaaagcagaaagacgacctggtagaaacctgcattcggttaaacaccacgcacgttgccatgcagcgtacgaagaaggccaagaacggccgcctggtgacggtatccgagggtgaagccttgattagccgctacaagatcgtaaagagcgaaaccgggcggccggagtacatcgagatcgagctagctgattggatgtaccgcgagatcacagaaggcaagaacccggacgtgctgacggttcaccccgattactttttgatcgatcccggcatcggccgttttctctaccgcctggcacgccgcgccgcaggcaaggcagaagccagatggttgttcaagacgatctacgaacgcagtggcagcgccggagagttcaagaagttctgtttcaccgtgcgcaagctgatcgggtcaaatgacctgccggagtacgatttgaaggaggaggcggggcaggctggcccgatcctagtcatgcgctaccgcaacctgatcgagggcgaagcatccgccggttcctaatgtacggagcagatgctagggcaaattgccctagcaggggaaaaaggtcgaaaaggtctctttcctgtggatagcacgtacattgggaacccaaagccgtacattgggaaccggaacccgtacattgggaacccaaagccgtacattgggaaccggtcacacatgtaagtgactgatataaaagagaaaaaaggcgatttttccgcctaaaactctttaaaacttattaaaactcttaaaacccgcctggcctgtgcatatgctagtcatgccccgcgcccaccggaaggagctgactgggttgaaggctctcaagggcatcggtcgagatcc

SEQ ID NO: 80 - DNA, 11289 bp, synthetic construct
  misc_feature 1..11289: note = pWISE3452 Full plasmid sequence
  source 1..11289: mol_type = other DNA
cggtgcctaatgagtgagctaacttacattaattgcgttgcgccccgggatgagattatcaaaaaggatcttcacctagatccttttaaattaaaaatgaagttttaaatcaatctaaagtatatatgtgtaacattggtctagtgattggatccggagactcgaccagggtaatcagcacgtctgttcggcgcgcctatagctatggtttctcgcaatcgctttgggcagtcggttgtggcggtgcgtcttctgagacccgaaggttggcgattatctgctggaggtcttcgataccgtcttcgaagaacaagacatatgttcgctgagctcggacataggatagtcggcataggcggataccctcgccacgcaaatggcgcgatcgacaccctgatcggagcctgcgaagtgccacagtttattggaaccatcccccgttcattccgccctggaatttcacttcgacggcattctagatcctcgccgttgtcttagagagccatctttcgtcggcgcacccttaagtgcatggaaagccgttttcgcttcaaatgaaatcgaaaagaagaaaacaaaaatcctagagtaaccgaccctcccgataatcgtgaacatcagatgacagcatttcttccgaccgaagtggctgtgttggttatgagcttggggagatggggaggtaccatgagcggctccaagaagcgccgcatcaagcaagattcaaagctggagaagttcaccaactgctactcgctgagcaagacgctgcggttcaaggccatccccgtgggcaagacccaggagaacatcgacaacaagcgcctcctggtcgaggacgagaagcgcgccgaggactacaagggcgtcaagaagctcctggaccggtattacctcagcttcatcaacgacgtgctgcactcgatcaagctcaagaacctgaacaactacatcagcctgttccgcaagaaaacgcgcaccgagaaggagaacaaagagctggagaacctggagatcaacctgcggaaggagattgcgaaagctttcaagggcaacgagggctacaagtcgctcttcaagaaagacataatcgagaccatcctgccggagttcctggacgacaaggacgagatcgcgctcgtcaactcgttcaacgggttcactacggccttcacgggtttcttcgataaccgggagaatatgtttagcgaggaggccaagtccacctccattgcgttccgctgcatcaacgagaacctgacccgctacatcagcaacatggacatcttcgagaaggtggacgccatcttcgacaagcacgaggtccaggagatcaaggagaagattctgaactcggactacgacgtggaagacttcttcgagggcgagtttttcaacttcgtcctgacccaggaggggatcgacgtttataacgccatcatcggcgggttcgtcacggagtcgggcgaaaagatcaagggcctgaacgagtatattaacctgtacaaccagaagacaaagcagaagctgccgaagttcaagccgctgtacaagcaagtcctgtccgaccgcgagtcgctgtcgttctacggcgaaggctacacctcggacgaggaggtgctggaggtgttccgcaacaccctgaacaagaatagcgaaatttttagctccattaagaagctcgagaagctgttcaagaacttcgacgagtacagcagcgccgggatcttcgtcaagaacggccccgcgatcagcaccatctcgaaggacatcttcggcgagtggaacgtcatccgggacaagtggaacgccgagtacgacgacattcaccttaaaaagaaggctgttgtgacggagaagtacgaggacgaccggcgcaagtcgttcaaaaagatcggctccttctccctggagcagctccaggagtacgccgacgccgacctctcggtcgtcgagaagctcaaggagatcatcattcagaaggtggacgaaatttacaaagtgtacggctccagcgagaagctgttcgacgccgacttcgtgctggaaaagtcgctcaagaaaaacgacgccgtggtggccatcatgaaggacttgctggacagcgtgaagtcgttcgagaactacattaaggcgttctttggcgagggcaaggagaccaaccgcgacgagtcgttctacggcgacttcgtgctcgcgtacgacatcctgctcaaggtggatcacatctacgacgcgatccgcaactacgtcacgcagaagccgtactcgaaggacaagttcaagctgtacttccagaacccgcagttcatgggcgggtgggacaaggacaaggaaacggactaccgcgcgaccatcctgcggtacggcagcaagtattatctggcgatcatggacaaaaaatatgccaagtgcctccagaaaatcgacaaggacgacgtgaacggcaactacgagaagattaattacaagctgctccccggccccaacaagatgctcccgaaggtgttctttagcaagaagtggatggcctactacaacccgagcgaggacatccagaagatctataagaatggcaccttcaagaagggagacatgtttaacctcaacgactgccacaagctgattgacttcttcaaggactcgatctcgcgctacccgaagtggtcgaacgcctacgacttcaacttcagcgaaacggagaaatacaaagacatcgcgggcttctaccgcgaggtcgaggagcaaggctacaaggtcagcttcgagtccgccagcaagaaggaggtggacaagctggtggaggagggcaagctctacatgtttcagatctacaacaaggattttagcgacaagtcgcacggcacgccgaacctgcacacgatgtacttcaagctgctgttcgacgagaacaaccacggccagatccggctgtcgggcggtgcggagctgttcatgcgccgggcgtcgctcaagaaggaagagctggtcgtccacccggccaacagccccatcgccaacaagaaccccgacaaccccaagaaaacgacgacactcagctatgatgtctataaagacaagcgcttctcggaggaccagtacgagctgcacatccccatcgccatcaacaagtgccccaagaacatcttcaagatcaacacggaggtccgcgtgctcctcaagcacgacgacaacccgtacgtcatcggcatcgaccggggcgagcgcaacctgctgtacatcgtcgtcgtcgatggcaagggcaacatcgtggagcagtattccctgaacgagatcatcaacaacttcaacggcatccgcatcaagaccgactaccactccctcctcgacaagaaggagaaagagcgcttcgaggcccgccagaactggacctccatcgagaacatcaaggagcttaaggcgggctacatctcccaagtcgtccacaagatctgcgagctggtcgagaagtacgacgcggtgatcgccctggaagacctgaactccggcttcaagaactcccgcgtaaaggtggagaagcaagtgtaccagaagttcgagaagatgctgatcgacaagctgaactacatggtggacaagaaatcgaacccgtgcgcgaccggcggcgcgctcaagggctaccagatcacgaacaagttcgagtcgttcaagtccatgagcacgcagaacggctttatcttctacatcccggcctggctgacgtcgaagatcgacccctcgaccggcttcgtgaacctgctcaagaccaagtatactagcattgccgactccaagaaattcatctcgtccttcgaccgcatcatgtacgtcccggaggaggacctttttgagttcgccctcgactacaagaacttcagccgcaccgacgccgactacatcaagaagtggaagctgtactcgtacgggaaccgcatccgtatttttcgcaacccgaagaaaaataatgtcttcgactgggaggaggtgtgcctgaccagcgcctacaaggagctgttcaacaagtacggcatcaactaccaacagggcgacatccgggcccttctctgcgagcagagcgacaaggcgttctactcgtcgttcatggccctgatgagcctgatgctccagatgaggaacagcatcaccggccgcaccgacgtggacttcctcatcagccccgtcaagaactcggacggcatattttatgactcgcggaactacgaggcccaggagaacgccatcctgcccaagaacgccgacgccaacggcgcgtacaacatcgcccgcaaggtgctctgggccatcggccagttcaagaaggcggaagacgagaagctggacaaggtgaagatcgccatctccaacaaggagtggctggagtacgcgcagacgtccgtcaagcacggctccaagaaacggcggatcaaacaagattccggtggaagttccggaggttcaagcgggtctgaaacgccgggcaccagcgagtcggcgaccccggaaagcagcggtggttcttccggcggtagcatgcccgatcgagctcaagttatcattcgcattgtgccgggaggtggcaccaagacccttcaacaaattatcaatcagttggagtatctatcccggaagggcaggctggagctgcagcgttcagcccgacatctcgatattcccctgccaccggatcaaatccacgaacttgcccgaagctgggttcaagagactggaacttatgacgaaagtcagccagacgaggaaaggcaacaggagttgaccacccatattattgtaagcttccccgccggtacaagccaggtagcggcttatgcggcgagccgggagtgggcagccgagatgtttgggtcaggcgcaggggggggccgatacaactatcttacggccttccacatcgatcgcgaccacccacatctgcatgtcgtcgtcaatcggcgcgaacttttaggacacggctggctgaagatatctcggcgccatccccaactgaattacgacgccctgcgcataaagatggccgagatttcacttcgtcatggcattgccctcgatgcgagccgacgagcagaacgtggcatcaccgagcggccgatcacttatgcccaatatcggcgccttgagcgggagcaggctcgccaaatccgtttcgaagacgcggatttggaacagtcgtcgccgcaaggagatcatccagaattcagccaacctttcgatacatccccatttgaagcatccgcgggcggaccggaggacatgcctcggcccaacaatcggcagaatgagtcgcaagttcatctccaggagccagctggtgtcagcaacgaagccggtgtccttgtgcgggttgcattggaaacggagcgccttgctcaaccattcgtttccgaaaccattctcgcggacgacatagggagcggctcttcgcgtgttgccgagggccgtgtggagagcgcaaaccgcactcccgatattcctcgcgcagcaactgaagctgccacgcacacgacacacgaccggcagcggcgtgcaaagcgtcctcatgatgacgacggagggccgagtggagcaaaacgtgtgacattggaaggcatcgcggttgggccccaggcgaacgccggcgaacaggatggcagtagtggccccttagtacggcaagctggaacgtcacggccatctccaccgacggccacgacgcgggccagcaccgcaaccgattcattgtctgctacagcccacctccagcaacggagaggtgtcctttcaaagcgtccgcgtgaagatgatgatggagaaccgagtgaacgcaaacgcgagagagatgagcgcagcaaggacgggcgtgggggaaataggagatagtctagaccaggcatcaaataaaacgaaaggctcagtcgaaagactgggcctttcgttttatctgttgtttgtcggtgaacgctctctactagagtcacactggctcaccttcgggtgggcctttctgcgtttatagtacgatatcccaatggcgcgccgagcttggctcgagcatggtcatagctgtttcctgtgtgaaattgttatccgctcacaattccacacaacatacgagccggaagcataaagtgtaaagcctggggtgcctaatgagtgagctaactcacattaattgcgttgcgctcactgcccgctttccagtcgggaaacctgtcgtgccagctgcattaatgaatcggccaacgcgcggggagaggcggtttgcgtattgggcgctgttccgcttcctcgctcactgactcgctgcgctcggtcgttcggctgcggcgagcggtatcagctcactcaaaggcggtaatacggttatccacagaatcaggggataacgcaggaaagaacatgtgagcaaaaggccagcaaaaggccaggaaccgtaaaaaggccgcgttgctggcgtttttccataggctccgcccccctgacgagcatcacaaaaatcgacgctcaagtcagaggtggcgaaacccgacaggactataaagataccaggcgtttccccctggaagctccctcgtgcgctctcctgttccgaccctgccgcttaccggatacctgtccgcctttctcccttcgggaagcgtggcgctttctcatagctcacgctgtaggtatctcagttcggtgtaggtcgttcgctccaagctgggctgtgtgcacgaaccccccgttcagcccgaccgctgcgccttatccggtaactatcgtcttgagtccaacccggtaagacacgacttatcgccactggcagcagccactggtaacaggattagcagagcgaggtatgtaggcggtgctacagagttcttgaagtggtggcctaactacggctacactagaagaacagtatttggtatctgcgctctgctgaagccagttaccttcggaaaaagagttggtagctcttgatccggcaaacaaaccaccgctggtagcggtggtttttttgtttgcaagcagcagattacgcgcagaaaaaaaggatctcaagaagatcctttgatcttttctacggggtctgacgctcagtggaacgaaaactcacgttaagggattttggtcatgagattatcaaaaaggatcttcacctagatccttttaaattaaaaatgaagttttaaatcaatctaaagtatatatgagtaaacttggtctgacagttagaaaaactcatcgagcatcaaatgaaactgcaatttattcatatcaggattatcaataccatatttttgaaaaagccgtttctgtaatgaaggagaaaactcaccgaggcagttccataggatggcaagatcctggtatcggtctgcgattccgactcgtccaacatcaatacaacctattaatttcccctcgtcaaaaataaggttatcaagtgagaaatcaccatgagtgacgactgaatccggtgagaatggcaaaagtttatgcatttctttccagacttgttcaacaggccagccattacgctcgtcatcaaaatcactcgcatcaaccaaaccgttattcattcgtgattgcgcctgagcgaaacgaaatacgcgatcgctgttaaaaggacaattacaaacaggaatcgaatgcaaccggcgcaggaacactgccagcgcatcaacaatattttcacctgaatcaggatattcttctaatacctggaatgctgttttcccagggatcgcagtggtgagtaaccatgcatcatcaggagtacggataaaatgcttgatggtcggaagaggcataaattccgtcagccagtttagtctgaccatctcatctgtaacatcattggcaacgctacctttgccatgtttcagaaacaactctggcgcatcgggcttcccatacaatcgatagattgtcgcacctgattgcccgacattatcgcgagcccatttatacccatataaatcagcatccatgttggaatttaatcgcggcctagagcaagacgtttcccgttgaatatggctcatactcttcctttttcaatattattgaagcatttatcagggttattgtctcatgagcggatacatatttgaatgtatttagaaaaataaacaaataggggttccgcgcacatttccccgaaaagtgccacctgacgtctaagaaaccattattatcatgacattaacctataaaaataggcgtatcacgaggcccttttgtctcgcgcgtttcggtgatgacggtgaaaacctctgacacatgcagctcccggagactgtcacagcttgtctgtaagcggatgccgggagcagacaagcccgtcagggcgcgtcagcgggtgttggcgggtgtcggggctggcttaactatgcggcatcagagcagattgtactgagagtgcaccatatgcggtgtgaaataccgcacagatgcgtaaggagaaaataccgcatcaggcgccattcgccattcaggctgcgcaactgttgggaagggcgatcggtgcgggcctcttcgctattacgccagctggcgaaagggggatgtgctgcaaggcgattaagttgggtaacgccagggttttcccagtcacgacgttgtaaaacgacggccagtgaattgacgcgttgcggctgcatgaaatcctggccggtttgtctgatgccaagctggcggcctggccggccagcttggccgctgaagaaaccgagcgccgccgtctaaaaaggtgatgtgtatttgagtaaaacagcttgcgtcatgcggtcgctgcgtatatgatgcgatgagtaaataaacaaatacgcaaggggaacgcatgaaggttatcgctgtacttaaccagaaaggcgggtcaggcaagacgaccatcgcaacccatctagcccgcgccctgcaactcgccggggccgatgttctgttagtcgattccgatccccagggcagtgcccgcgattgggcggccgtgcgggaagatcaaccgctaaccgttgtcggcatcgaccgcccgacgattgaccgcgacgtgaaggccatcggccggcgcgacttcgtagtgatcgacggagcgccccaggcggcggacttggctgtgtccgcgatcaaggcagccgacttcgtgctgattccggtgcagccaagcccttacgacatatgggccaccgccgacctggtggagctggttaagcagcgcattgaggtcacggatggaaggctacaagcggcctttgtcgtgtcgcgggcgatcaaaggcacgcgcatcggcggtgaggttgccgaggcgctggccgggtacgagctgcccattcttgagtcccgtatcacgcagcgcgtgagctacccaggcactgccgccgccggcacaaccgttcttgaatcagaacccgagggcgacgctgcccgcgaggtccaggcgctggccgctgaaattaaatcaaaactcatttgagttaatgaggtaaagagaaaatgagcaaaagcacaaacacgctaagtgccggccgtccgagcgcacgcagcagcaaggctgcaacgttggccagcctggcagacacgccagccatgaagcgggtcaactttcagttgccggcggaggatcacaccaagctgaagatgtacgcggtacgccaaggcaagaccattaccgagctgctatctgaatacatcgcgcagctaccagagtaaatgagcaaatgaataaatgagtagatgaattttagcggctaaaggaggcggcatggaaaatcaagaacaaccaggcaccgacgccgtggaatgccccatgtgtggaggaacgggcggttggccaggcgtaagcggctgggttgtctgccggccctgcaatggcactggaacccccaagcccgaggaatcggcgtgagcggtcgcaaaccatccggcccggtacaaatcggcgcggcgctgggtgatgacctggtggagaagttgaaggccgcgcaggccgcccagcggcaacgcatcgaggcagaagcacgccccggtgaatcgtggcaagcggccgctgatcgaatccgcaaagaatcccggcaaccgccggcagccggtgcgccgtcgattaggaagccgcccaagggcgacgagcaaccagattttttcgttccgatgctctatgacgtgggcacccgcgatagtcgcagcatcatggacgtggccgttttccgtctgtcgaagcgtgaccgacgagctggcgaggtgatccgctacgagcttccagacgggcacgtagaggtttccgcagggccggccggcatggccagtgtgtgggattacgacctggtactgatggcggtttcccatctaaccgaatccatgaaccgataccgggaagggaagggagacaagcccggccgcgtgttccgtccacacgttgcggacgtactcaagttctgccggcgagccgatggcggaaagcagaaagacgacctggtagaaacctgcattcggttaaacaccacgcacgttgccatgcagcgtacgaagaaggccaagaacggccgcctggtgacggtatccgagggtgaagccttgattagccgctacaagatcgtaaagagcgaaaccgggcggccggagtacatcgagatcgagctagctgattggatgtaccgcgagatcacagaaggcaagaacccggacgtgctgacggttcaccccgattactttttgatcgatcccggcatcggccgttttctctaccgcctggcacgccgcgccgcaggcaaggcagaagccagatggttgttcaagacgatctacgaacgcagtggcagcgccggagagttcaagaagttctgtttcaccgtgcgcaagctgatcgggtcaaatgacctgccggagtacgatttgaaggaggaggcggggcaggctggcccgatcctagtcatgcgctaccgcaacctgatcgagggcgaagcatccgccggttcctaatgtacggagcagatgctagggcaaattgccctagcaggggaaaaaggtcgaaaaggtctctttcctgtggatagcacgtacattgggaacccaaagccgtacattgggaaccggaacccgtacattgggaacccaaagccgtacattgggaaccggtcacacatgtaagtgactgatataaaagagaaaaaaggcgatttttccgcctaaaactctttaaaacttattaaaactcttaaaacccgcctggcctgtgcatatgctagtcatgccccgcgcccaccggaaggagctgactgggttgaaggctctcaagggcatcggtcgagatcc

SEQ ID NO: 81 - DNA, 7707 bp, synthetic construct
  misc_feature 1..7707: note = pWISE3592 Full plasmid sequence
  source 1..7707: mol_type = other DNA
accggaaggagctgactgggttgaaggctctcaagggcatcggtcgagatcccggtgcctaatgagtgagctaacttacattaattgcgttgcgccccgggatgagattatcaaaaaggatcttcacctagatccttttaaattaaaaatgaagttttaaatcaatctaaagtatatatgtgtaacattggtctagtgattggatccggagactcgaccagggtaatcagcacgtctgttcggcgcgcctatagctatggtttctcgcaatcgctttgggcagtcggttgtggcggtgcgtcttctgagacccgaaggttggcgattatctgctggaggtcttcgataccgtcttcgaagaacaagacatatgttcgctgagctcggacataggatagtcggcataggcggataccctcgccacgcaaatggcgcgatcgacaccctgatcggagcctgcgaagtgccacagtttattggaaccatcccccgttcattccgccctggaatttcacttcgacggcattctagatcctcgccgttgtcttagagagccatctttcgtcggcgcacccttaagtgcatggaaagccgttttcgcttcaaatgaaatcgaaaagaagaaaacaaaaatcctagagtaaccgaccctcccgataatcgtgaacatcagatgacagcatttcttccgaccgaagtggctgtgttggttatgagcttggggagatggggaggtaccatgcccgatcgagctcaagttatcattcgcattgtgccgggaggtggcaccaagacccttcaacaaattatcaatcagttggagtatctatcccggaagggcaggctggagctgcagcgttcagcccgacatctcgatattcccctgccaccggatcaaatccacgaacttgcccgaagctgggttcaagagactggaacttatgacgaaagtcagccagacgaggaaaggcaacaggagttgaccacccatattattgtaagcttccccgccggtacaagccaggtagcggcttatgcggcgagccgggagtgggcagccgagatgtttgggtcaggcgcaggggggggccgatacaactatcttacggccttccacatcgatcgcgaccacccacatctgcatgtcgtcgtcaatcggcgcgaacttttaggacacggctggctgaagatatctcggcgccatccccaactgaattacgacgccctgcgcataaagatggccgagatttcacttcgtcatggcattgccctcgatgcgagccgacgagcagaacgtggcatcaccgagcggccgatcacttatgcccaatatcggcgccttgagcgggagcaggctcgccaaatccgtttcgaagacgcggatttggaacagtcgtcgccgcaaggagatcatccagaattcagccaacctttcgatacatccccatttgaagcatccgcgggcggaccggaggacatgcctcggcccaacaatcggcagaatgagtcgcaagttcatctccaggagccagctggtgtcagcaacgaagccggtgtccttgtgcgggttgcattggaaacggagcgccttgctcaaccattcgtttccgaaaccattctcgcggacgacatagggagcggctcttcgcgtgttgccgagggccgtgtggagagcgcaaaccgcactcccgatattcctcgcgcagcaactgaagctgccacgcacacgacacacgaccggcagcggcgtgcaaagcgtcctcatgatgacgacggagggccgagtggagcaaaacgtgtgacattggaaggcatcgcggttgggccccaggcgaacgccggcgaacaggatggcagtagtgggggctcctcgggtggcagcatgagcggatcaaaaaaaagaaggatcaagcaagatgcggagtacgtgcgtgctttgtttgatttcaacggcaacgatgaagaagacctgccattcaaaaagggcgacatcctgcgtattcgtgataaaccggaagagcagtggtggaatgcagaggacagcgaaggtaagcgcggtatgatcccggttccgtatgtcgagaagtactccggtagtggggggtcctctggtggaagtagtggccccttagtacggcaagctggaacgtcacggccatctccaccgacggccacgacgcgggccagcaccgcaaccgattcattgtctgctacagcccacctccagcaacggagaggtgtcctttcaaagcgtccgcgtgaagatgatgatggagaaccgagtgaacgcaaacgcgagagagatgagcgcagcaaggacgggcgtgggggaaataggagatagtctagaccaggcatcaaataaaacgaaaggctcagtcgaaagactgggcctttcgttttatctgttgtttgtcggtgaacgctctctactagagtcacactggctcaccttcgggtgggcctttctgcgtttatagtacgatatcccaatggcgcgccgagcttggctcgagcatggtcatagctgtttcctgtgtgaaattgttatccgctcacaattccacacaacatacgagccggaagcataaagtgtaaagcctggggtgcctaatgagtgagctaactcacattaattgcgttgcgctcactgcccgctttccagtcgggaaacctgtcgtgccagctgcattaatgaatcggccaacgcgcggggagaggcggtttgcgtattgggcgctgttccgcttcctcgctcactgactcgctgcgctcggtcgttcggctgcggcgagcggtatcagctcactcaaaggcggtaatacggttatccacagaatcaggggataacgcaggaaagaacatgtgagcaaaaggccagcaaaaggccaggaaccgtaaaaaggccgcgttgctggcgtttttccataggctccgcccccctgacgagcatcacaaaaatcgacgctcaagtcagaggtggcgaaacccgacaggactataaagataccaggcgtttccccctggaagctccctcgtgcgctctcctgttccgaccctgccgcttaccggatacctgtccgcctttctcccttcgggaagcgtggcgctttctcatagctcacgctgtaggtatctcagttcggtgtaggtcgttcgctccaagctgggctgtgtgcacgaaccccccgttcagcccgaccgctgcgccttatccggtaactatcgtcttgagtccaacccggtaagacacgacttatcgccactggcagcagccactggtaacaggattagcagagcgaggtatgtaggcggtgctacagagttcttgaagtggtggcctaactacggctacactagaagaacagtatttggtatctgcgctctgctgaagccagttaccttcggaaaaagagttggtagctcttgatccggcaaacaaaccaccgctggtagcggtggtttttttgtttgcaagcagcagattacgcgcagaaaaaaaggatctcaagaagatcctttgatcttttctacggggtctgacgctcagtggaacgaaaactcacgttaagggattttggtcatgagattatcaaaaaggatcttcacctagatccttttaaattaaaaatgaagttttaaatcaatctaaagtatatatgagtaaacttggtctgacagttagaaaaactcatcgagcatcaaatgaaactgcaatttattcatatcaggattatcaataccatatttttgaaaaagccgtttctgtaatgaaggagaaaactcaccgaggcagttccataggatggcaagatcctggtatcggtctgcgattccgactcgtccaacatcaatacaacctattaatttcccctcgtcaaaaataaggttatcaagtgagaaatcaccatgagtgacgactgaatccggtgagaatggcaaaagtttatgcatttctttccagacttgttcaacaggccagccattacgctcgtcatcaaaatcactcgcatcaaccaaaccgttattcattcgtgattgcgcctgagcgaaacgaaatacgcgatcgctgttaaaaggacaattacaaacaggaatcgaatgcaaccggcgcaggaacactgccagcgcatcaacaatattttcacctgaatcaggatattcttctaatacctggaatgctgttttcccagggatcgcagtggtgagtaaccatgcatcatcaggagtacggataaaatgcttgatggtcggaagaggcataaattccgtcagccagtttagtctgaccatctcatctgtaacatcattggcaacgctacctttgccatgtttcagaaacaactctggcgcatcgggcttcccatacaatcgatagattgtcgcacctgattgcccgacattatcgcgagcccatttatacccatataaatcagcatccatgttggaatttaatcgcggcctagagcaagacgtttcccgttgaatatggctcatactcttcctttttcaatattattgaagcatttatcagggttattgtctcatgagcggatacatatttgaatgtatttagaaaaataaacaaataggggttccgcgcacatttccccgaaaagtgccacctgacgtctaagaaaccattattatcatgacattaacctataaaaataggcgtatcacgaggcccttttgtctcgcgcgtttcggtgatgacggtgaaaacctctgacacatgcagctcccggagactgtcacagcttgtctgtaagcggatgccgggagcagacaagcccgtcagggcgcgtcagcgggtgttggcgggtgtcggggctggcttaactatgcggcatcagagcagattgtactgagagtgcaccatatgcggtgtgaaataccgcacagatgcgtaaggagaaaataccgcatcaggcgccattcgccattcaggctgcgcaactgttgggaagggcgatcggtgcgggcctcttcgctattacgccagctggcgaaagggggatgtgctgcaaggcgattaagttgggtaacgccagggttttcccagtcacgacgttgtaaaacgacggccagtgaattgacgcgttgcggctgcatgaaatcctggccggtttgtctgatgccaagctggcggcctggccggccagcttggccgctgaagaaaccgagcgccgccgtctaaaaaggtgatgtgtatttgagtaaaacagcttgcgtcatgcggtcgctgcgtatatgatgcgatgagtaaataaacaaatacgcaaggggaacgcatgaaggttatcgctgtacttaaccagaaaggcgggtcaggcaagacgaccatcgcaacccatctagcccgcgccctgcaactcgccggggccgatgttctgttagtcgattccgatccccagggcagtgcccgcgattgggcggccgtgcgggaagatcaaccgctaaccgttgtcggcatcgaccgcccgacgattgaccgcgacgtgaaggccatcggccggcgcgacttcgtagtgatcgacggagcgccccaggcggcggacttggctgtgtccgcgatcaaggcagccgacttcgtgctgattccggtgcagccaagcccttacgacatatgggccaccgccgacctggtggagctggttaagcagcgcattgaggtcacggatggaaggctacaagcggcctttgtcgtgtcgcgggcgatcaaaggcacgcgcatcggcggtgaggttgccgaggcgctggccgggtacgagctgcccattcttgagtcccgtatcacgcagcgcgtgagctacccaggcactgccgccgccggcacaaccgttcttgaatcagaacccgagggcgacgctgcccgcgaggtccaggcgctggccgctgaaattaaatcaaaactcatttgagttaatgaggtaaagagaaaatgagcaaaagcacaaacacgctaagtgccggccgtccgagcgcacgcagcagcaaggctgcaacgttggccagcctggcagacacgccagccatgaagcgggtcaactttcagttgccggcggaggatcacaccaagctgaagatgtacgcggtacgccaaggcaagaccattaccgagctgctatctgaatacatcgcgcagctaccagagtaaatgagcaaatgaataaatgagtagatgaattttagcggctaaaggaggcggcatggaaaatcaagaacaaccaggcaccgacgccgtggaatgccccatgtgtggaggaacgggcggttggccaggcgtaagcggctgggttgtctgccggccctgcaatggcactggaacccccaagcccgaggaatcggcgtgagcggtcgcaaaccatccggcccggtacaaatcggcgcggcgctgggtgatgacctggtggagaagttgaaggccgcgcaggccgcccagcggcaacgcatcgaggcagaagcacgccccggtgaatcgtggcaagcggccgctgatcgaatccgcaaagaatcccggcaaccgccggcagccggtgcgccgtcgattaggaagccgcccaagggcgacgagcaaccagattttttcgttccgatgctctatgacgtgggcacccgcgatagtcgcagcatcatggacgtggccgttttccgtctgtcgaagcgtgaccgacgagctggcgaggtgatccgctacgagcttccagacgggcacgtagaggtttccgcagggccggccggcatggccagtgtgtgggattacgacctggtactgatggcggtttcccatctaaccgaatccatgaaccgataccgggaagggaagggagacaagcccggccgcgtgttccgtccacacgttgcggacgtactcaagttctgccggcgagccgatggcggaaagcagaaagacgacctggtagaaacctgcattcggttaaacaccacgcacgttgccatgcagcgtacgaagaaggccaagaacggccgcctggtgacggtatccgagggtgaagccttgattagccgctacaagatcgtaaagagcgaaaccgggcggccggagtacatcgagatcgagctagctgattggatgtaccgcgagatcacagaaggcaagaacccggacgtgctgacggttcaccccgattactttttgatcgatcccggcatcggccgttttctctaccgcctggcacgccgcgccgcaggcaaggcagaagccagatggttgttcaagacgatctacgaacgcagtggcagcgccggagagttcaagaagttctgtttcaccgtgcgcaagctgatcgggtcaaatgacctgccggagtacgatttgaaggaggaggcggggcaggctggcccgatcctagtcatgcgctaccgcaacctgatcgagggcgaagcatccgccggttcctaatgtacggagcagatgctagggcaaattgccctagcaggggaaaaaggtcgaaaaggtctctttcctgtggatagcacgtacattgggaacccaaagccgtacattgggaaccggaacccgtacattgggaacccaaagccgtacattgggaaccggtcacacatgtaagtgactgatataaaagagaaaaaaggcgatttttccgcctaaaactctttaaaacttattaaaactcttaaaacccgcctggcctgtgcatatgctagtcatgccccgcgccc

SEQ ID NO: 82 - DNA, 7276 bp, synthetic construct
  misc_feature 1..7276: note = pWISE3108 Full plasmid sequence
  source 1..7276: mol_type = other DNA
gcgcccaccggaaggagctgactgggttgaaggctctcaagggcatcggtcgagatcccggtgcctaatgagtgagctaacttacattaattgcgttgcgccccgggatgagattatcaaaaaggatcttcacctagatccttttaaattaaaaatgaagttttaaatcaatctaaagtatatatgtgtaacattggtctagtgattggatccttgacagctagctcagtcctaggtactgtgctagcgctagcaaagaggagaaaggtaccatgagcggatcaaaaaaaagaaggatcaagcaagatgcggagtacgtgcgtgctttgtttgatttcaacggcaacgatgaagaagacctgccattcaaaaagggcgacatcctgcgtattcgtgataaaccggaagagcagtggtggaatgcagaggacagcgaaggtaagcgcggtatgatcccggttccgtatgtcgagaagtactccggtggaagttccggaggttcaagcgggtctgaaacgccgggcaccagcgagtcggcgaccccggaaagcagcggtggttcttccggcggtagcatgcccgatcgagctcaagttatcattcgcattgtgccgggaggtggcaccaagacccttcaacaaattatcaatcagttggagtatctatcccggaagggcaggctggagctgcagcgttcagcccgacatctcgatattcccctgccaccggatcaaatccacgaacttgcccgaagctgggttcaagagactggaacttatgacgaaagtcagccagacgaggaaaggcaacaggagttgaccacccatattattgtaagcttccccgccggtacaagccaggtagcggcttatgcggcgagccgggagtgggcagccgagatgtttgggtcaggcgcaggggggggccgatacaactatcttacggccttccacatcgatcgcgaccacccacatctgcatgtcgtcgtcaatcggcgcgaacttttaggacacggctggctgaagatatctcggcgccatccccaactgaattacgacgccctgcgcataaagatggccgagatttcacttcgtcatggcattgccctcgatgcgagccgacgagcagaacgtggcatcaccgagcggccgatcacttatgcccaatatcggcgccttgagcgggagcaggctcgccaaatccgtttcgaagacgcggatttggaacagtcgtcgccgcaaggagatcatccagaattcagccaacctttcgatacatccccatttgaagcatccgcgggcggaccggaggacatgcctcggcccaacaatcggcagaatgagtcgcaagttcatctccaggagccagctggtgtcagcaacgaagccggtgtccttgtgcgggttgcattggaaacggagcgccttgctcaaccattcgtttccgaaaccattctcgcggacgacatagggagcggctcttcgcgtgttgccgagggccgtgtggagagcgcaaaccgcactcccgatattcctcgcgcagcaactgaagctgccacgcacacgacacacgaccggcagcggcgtgcaaagcgtcctcatgatgacgacggagggccgagtggagcaaaacgtgtgacattggaaggcatcgcggttgggccccaggcgaacgccggcgaacaggatggcagtagtggccccttagtacggcaagctggaacgtcacggccatctccaccgacggccacgacgcgggccagcaccgcaaccgattcattgtctgctacagcccacctccagcaacggagaggtgtcctttcaaagcgtccgcgtgaagatgatgatggagaaccgagtgaacgcaaacgcgagagagatgagcgcagcaaggacgggcgtgggggaaataggagatagtctagaccaggcatcaaataaaacgaaaggctcagtcgaaagactgggcctttcgttttatctgttgtttgtcggtgaacgctctctactagagtcacactggctcaccttcgggtgggcctttctgcgtttatagtacgatatcccaatggcgcgccgagcttggctcgagcatggtcatagctgtttcctgtgtgaaattgttatccgctcacaattccacacaacatacgagccggaagcataaagtgtaaagcctggggtgcctaatgagtgagctaactcacattaattgcgttgcgctcactgcccgctttccagtcgggaaacctgtcgtgccagctgcattaatgaatcggccaacgcgcggggagaggcggtttgcgtattgggcgctgttccgcttcctcgctcactgactcgctgcgctcggtcgttcggctgcggcgagcggtatcagctcactcaaaggcggtaatacggttatccacagaatcaggggataacgcaggaaagaacatgtgagcaaaaggccagcaaaaggccaggaaccgtaaaaaggccgcgttgctggcgtttttccataggctccgcccccctgacgagcatcacaaaaatcgacgctcaagtcagaggtggcgaaacccgacaggactataaagataccaggcgtttccccctggaagctccctcgtgcgctctcctgttccgaccctgccgcttaccggatacctgtccgcctttctcccttcgggaagcgtggcgctttctcatagctcacgctgtaggtatctcagttcggtgtaggtcgttcgctccaagctgggctgtgtgcacgaaccccccgttcagcccgaccgctgcgccttatccggtaactatcgtcttgagtccaacccggtaagacacgacttatcgccactggcagcagccactggtaacaggattagcagagcgaggtatgtaggcggtgctacagagttcttgaagtggtggcctaactacggctacactagaagaacagtatttggtatctgcgctctgctgaagccagttaccttcggaaaaagagttggtagctcttgatccggcaaacaaaccaccgctggtagcggtggtttttttgtttgcaagcagcagattacgcgcagaaaaaaaggatctcaagaagatcctttgatcttttctacggggtctgacgctcagtggaacgaaaactcacgttaagggattttggtcatgagattatcaaaaaggatcttcacctagatccttttaaattaaaaatgaagttttaaatcaatctaaagtatatatgagtaaacttggtctgacagttagaaaaactcatcgagcatcaaatgaaactgcaatttattcatatcaggattatcaataccatatttttgaaaaagccgtttctgtaatgaaggagaaaactcaccgaggcagttccataggatggcaagatcctggtatcggtctgcgattccgactcgtccaacatcaatacaacctattaatttcccctcgtcaaaaataaggttatcaagtgagaaatcaccatgagtgacgactgaatccggtgagaatggcaaaagtttatgcatttctttccagacttgttcaacaggccagccattacgctcgtcatcaaaatcactcgcatcaaccaaaccgttattcattcgtgattgcgcctgagcgaaacgaaatacgcgatcgctgttaaaaggacaattacaaacaggaatcgaatgcaaccggcgcaggaacactgccagcgcatcaacaatattttcacctgaatcaggatattcttctaatacctggaatgctgttttcccagggatcgcagtggtgagtaaccatgcatcatcaggagtacggataaaatgcttgatggtcggaagaggcataaattccgtcagccagtttagtctgaccatctcatctgtaacatcattggcaacgctacctttgccatgtttcagaaacaactctggcgcatcgggcttcccatacaatcgatagattgtcgcacctgattgcccgacattatcgcgagcccatttatacccatataaatcagcatccatgttggaatttaatcgcggcctagagcaagacgtttcccgttgaatatggctcatactcttcctttttcaatattattgaagcatttatcagggttattgtctcatgagcggatacatatttgaatgtatttagaaaaataaacaaataggggttccgcgcacatttccccgaaaagtgccacctgacgtctaagaaaccattattatcatgacattaacctataaaaataggcgtatcacgaggcccttttgtctcgcgcgtttcggtgatgacggtgaaaacctctgacacatgcagctcccggagactgtcacagcttgtctgtaagcggatgccgggagcagacaagcccgtcagggcgcgtcagcgggtgttggcgggtgtcggggctggcttaactatgcggcatcagagcagattgtactgagagtgcaccatatgcggtgtgaaataccgcacagatgcgtaaggagaaaataccgcatcaggcgccattcgccattcaggctgcgcaactgttgggaagggcgatcggtgcgggcctcttcgctattacgccagctggcgaaagggggatgtgctgcaaggcgattaagttgggtaacgccagggttttcccagtcacgacgttgtaaaacgacggccagtgaattgacgcgttgcggctgcatgaaatcctggccggtttgtctgatgccaagctggcggcctggccggccagcttggccgctgaagaaaccgagcgccgccgtctaaaaaggtgatgtgtatttgagtaaaacagcttgcgtcatgcggtcgctgcgtatatgatgcgatgagtaaataaacaaatacgcaaggggaacgcatgaaggttatcgctgtacttaaccagaaaggcgggtcaggcaagacgaccatcgcaacccatctagcccgcgccctgcaactcgccggggccgatgttctgttagtcgattccgatccccagggcagtgcccgcgattgggcggccgtgcgggaagatcaaccgctaaccgttgtcggcatcgaccgcccgacgattgaccgcgacgtgaaggccatcggccggcgcgacttcgtagtgatcgacggagcgccccaggcggcggacttggctgtgtccgcgatcaaggcagccgacttcgtgctgattccggtgcagccaagcccttacgacatatgggccaccgccgacctggtggagctggttaagcagcgcattgaggtcacggatggaaggctacaagcggcctttgtcgtgtcgcgggcgatcaaaggcacgcgcatcggcggtgaggttgccgaggcgctggccgggtacgagctgcccattcttgagtcccgtatcacgcagcgcgtgagctacccaggcactgccgccgccggcacaaccgttcttgaatcagaacccgagggcgacgctgcccgcgaggtccaggcgctggccgctgaaattaaatcaaaactcatttgagttaatgaggtaaagagaaaatgagcaaaagcacaaacacgctaagtgccggccgtccgagcgcacgcagcagcaaggctgcaacgttggccagcctggcagacacgccagccatgaagcgggtcaactttcagttgccggcggaggatcacaccaagctgaagatgtacgcggtacgccaaggcaagaccattaccgagctgctatctgaatacatcgcgcagctaccagagtaaatgagcaaatgaataaatgagtagatgaattttagcggctaaaggaggcggcatggaaaatcaagaacaaccaggcaccgacgccgtggaatgccccatgtgtggaggaacgggcggttggccaggcgtaagcggctgggttgtctgccggccctgcaatggcactggaacccccaagcccgaggaatcggcgtgagcggtcgcaaaccatccggcccggtacaaatcggcgcggcgctgggtgatgacctggtggagaagttgaaggccgcgcaggccgcccagcggcaacgcatcgaggcagaagcacgccccggtgaatcgtggcaagcggccgctgatcgaatccgcaaagaatcccggcaaccgccggcagccggtgcgccgtcgattaggaagccgcccaagggcgacgagcaaccagattttttcgttccgatgctctatgacgtgggcacccgcgatagtcgcagcatcatggacgtggccgttttccgtctgtcgaagcgtgaccgacgagctggcgaggtgatccgctacgagcttccagacgggcacgtagaggtttccgcagggccggccggcatggccagtgtgtgggattacgacctggtactgatggcggtttcccatctaaccgaatccatgaaccgataccgggaagggaagggagacaagcccggccgcgtgttccgtccacacgttgcggacgtactcaagttctgccggcgagccgatggcggaaagcagaaagacgacctggtagaaacctgcattcggttaaacaccacgcacgttgccatgcagcgtacgaagaaggccaagaacggccgcctggtgacggtatccgagggtgaagccttgattagccgctacaagatcgtaaagagcgaaaccgggcggccggagtacatcgagatcgagctagctgattggatgtaccgcgagatcacagaaggcaagaacccggacgtgctgacggttcaccccgattactttttgatcgatcccggcatcggccgttttctctaccgcctggcacgccgcgccgcaggcaaggcagaagccagatggttgttcaagacgatctacgaacgcagtggcagcgccggagagttcaagaagttctgtttcaccgtgcgcaagctgatcgggtcaaatgacctgccggagtacgatttgaaggaggaggcggggcaggctggcccgatcctagtcatgcgctaccgcaacctgatcgagggcgaagcatccgccggttcctaatgtacggagcagatgctagggcaaattgccctagcaggggaaaaaggtcgaaaaggtctctttcctgtggatagcacgtacattgggaacccaaagccgtacattgggaaccggaacccgtacattgggaacccaaagccgtacattgggaaccggtcacacatgtaagtgactgatataaaagagaaaaaaggcgatttttccgcctaaaactctttaaaacttattaaaactcttaaaacccgcctggcctgtgcatatgctagtcatgcccc

SEQ ID NO: 83 - DNA, 18916 bp, synthetic construct
  misc_feature 1..18916: note = pWISE3776 Full plasmid sequence
  source 1..18916: mol_type = other DNA
aagcttcgataaaaatgttttaaacgatatatattataaaaaaaaacgtttcaaaaataaatacaaaaatgtttttaaatatatataatttaactcattaaagaaaataaaaatgcaagtgcggtgacaagacaagctaaaagttgcaaaagaaatggcagggctataaggctcacctactcctggatttaccaaattttggttcgtccctatactcgaaaaataaaacaaaataaatttcagtatcttcgtttttgtatgctttgactgtgaggcgaggccaactttcttcttctgtctgagatgaattttgtttgcctcctgtgaaggatgtatcattcaaagtgaatgttttgcaactgccagtagtcccacatcgaccaaatattcttattacagtgtgtttatatagcacctggagaaggaatgggttgtttcaaagattaaataatttctactaagtgtagattgtgtgatgttcgatgttggatttaatttctactaagtgtagattttttttactagtgatatccgtcgactggtacctacgcgtagctagcccgtgaagtttctcatctaagcccccatttggacgtgaatgtagacacgtcgaaataaagatttccgaattagaataatttgtttattgctttcgcctataaatacgacggatcgtaatttgtcgttttatcaaaatgtactttcattttataataacgctgcggacatctacatttttgaattgaaaaaaaattggtaattactctttctttttctccatattgaccatcatactcattgctgatccatgtagatttcccggacatgaagccatttacaattgaatatatcctgccgccgctgccgctttgcacccggtggagcttgcatgttggtttctacgcagaactgagccggttaggcagataatttccattgagaactgagccatgtgcaccttccccccaacacggtgagcgacggggcaacggagtgatccacatgggacttttcctagcttggctgccatttttggggtgaggccgttcgcggccgaggggcgcagcccctggggggatgggaggcccgcgttagcgggccgggagggttcgagaagggggggcaccccccttcggcgtgcgcggtcacgcgcacagggcgcagccctggttaaaaacaaggtttataaatattggtttaaaagcaggttaaaagacaggttagcggtggccgaaaaacgggcggaaacccttgcaaatgctggattttctgcctgtggacagcccctcaaatgtcaataggtgcgcccctcatctgtcagcactctgcccctcaagtgtcaaggatcgcgcccctcatctgtcagtagtcgcgcccctcaagtgtcaataccgcagggcacttatccccaggcttgtccacatcatctgtgggaaactcgcgtaaaatcaggcgttttcgccgatttgcgaggctggccagctccacgtcgccggccgaaatcgagcctgcccctcatctgtcaacgccgcgccgggtgagtcggcccctcaagtgtcaacgtccgcccctcatctgtcagtgagggccaagttttccgcgaggtatccacaacgccggcggccggccgcggtgtctcgcacacggcttcgacggcgtttctggcgcgtttgcagggccatagacggccgccagcccagcggcgagggcaaccagcccggtgagcgtcggaaagggtcgatcgaccgatgcccttgagagccttcaacccagtcagctccttccggtgggcgcggggcatgactatcgtcgccgcacttatgactgtcttctttatcatgcaactcgtaggacaggtgccggcagcgctctgggtcattttcggcgaggaccgctttcgctggagcgcgacgatgatcggcctgtcgcttgcggtattcggaatcttgcacgccctcgctcaagccttcgtcactggtcccgccaccaaacgtttcggcgagaagcaggccattatcgccggcatggcggccgacgcgctgggctacgtcttgctggcgttcgcgacgcgaggctggatggccttccccattatgattcttctcgcttccggcggcatcgggatgcccgcgttgcaggccatgctgtccaggcaggtagatgacgaccatcagggacagcttcaaggatcgctcgcggctcttaccagcctaacttcgatcattggaccgctgatcgtcacggcgatttatgccgcctcggcgagcacatggaacgggttggcatggattgtaggcgccgccctataccttgtctgcctccccgcgttgcgtcgcggtgcatggagccgggccacctcgacctgaatggaagccggcggcacctcgctaacggattcaccactccaagaattggagccaatcaattcttgcggagaactgtgaatgcgcaaaccaacccttggcagaacatatccatcgcgtccgccatctccagcagccgcacgcggcgcatctcgggcagcgttgggtcctggccacgggtgcgcatgatcgtgctcctgtcgttgaggacccggctaggctggcggggttgccttactggttagcagaatgaatcaccgatacgcgagcgaacgtgaagcgactgctgctgcaaaacgtctgcgacctgagcaacaacatgaatggtcttcggtttccgtgtttcgtaaagtctggaaacgcggaagtcagcgccctgcaccattatgttccggatctgcatcgcaggatgctgctggctaccctgtggaacacctacatctgtattaacgaagcgctggcattgaccctgagtgatttttctctggtcccgccgcatccataccgccagttgtttaccctcacaacgttccagtaaccgggcatgttcatcatcagtaacccgtatcgtgagcatcctctctcgtttcatcggtatcattacccccatgaacagaaatcccccttacacggaggcatcagtgaccaaacaggaaaaaaccgcccttaacatggcccgctttatcagaagccagacattaacgcttctggagaaactcaacgagctggacgcggatgaacaggcagacatctgtgaatcgcttcacgaccacgctgatgagctttaccgcagctgcctcgcgcgtttcggtgatgacggtgaaaacctctgacacatgcagctcccggagacggtcacagcttgtctgtaagcggatgccgggagcagacaagcccgtcagggcgcgtcagcgggtgttggcgggtgtcggggcgcagccatgacccagtcacgtagcgatagcggagtgtatactggcttaactatgcggcatcagagcagattgtactgagagtgcaccatatgcggtgtgaaataccgcacagatgcgtaaggagaaaataccgcatcaggcgctcttccgcttcctcgctcactgactcgctgcgctcggtcgttcggctgcggcgagcggtatcagctcactcaaaggcggtaatacggttatccacagaatcaggggataacgcaggaaagaacatgtgagcaaaaggccagcaaaaggccaggaaccgtaaaaaggccgcgttgctggcgtttttccataggctccgcccccctgacgagcatcacaaaaatcgacgctcaagtcagaggtggcgaaacccgacaggactataaagataccaggcgtttccccctggaagctccctcgtgcgctctcctgttccgaccctgccgcttaccggatacctgtccgcctttctcccttcgggaagcgtggcgctttctcatagctcacgctgtaggtatctcagttcggtgtaggtcgttcgctccaagctgggctgtgtgcacgaaccccccgttcagcccgaccgctgcgccttatccggtaactatcgtcttgagtccaacccggtaagacacgacttatcgccactggcagcagccactggtaacaggattagcagagcgaggtatgtaggcggtgctacagagttcttgaagtggtggcctaactacggctacactagaaggacagtatttggtatctgcgctctgctgaagccagttaccttcggaaaaagagttggtagctcttgatccggcaaacaaaccaccgctggtagcggtggtttttttgtttgcaagcagcagattacgcgcagaaaaaaaggatctcaagaagatcctttgatcttttctacggggtctgacgctcagtggaacgaaaactcacgttaagggattttggtcatgagattatcaaaaaggatcttcacctagatccttttaaattaaaaatgaagttttaaatcaatctaaagtatatatgagtaaacttggtctgacagttaccaatgcttaatcagtgaggcacctatctcagcgatctgtctatttcgttcatccatagttgcctgactccccgtcgtgtagataactacgatacgggagggcttaccatctggccccagtgctgcaatgataccgcgagacccacgctcaccggctccagatttatcagcaataaaccagccagccggaagggccgagcgcagaagtggtcctgcaactttatccgcctccatccagtctattaattgttgccgggaagctagagtaagtagttcgccagttaatagtttgcgcaacgttgttgccattgctgcaggtcgggagcacaggatgacgcctaacaattcattcaagccgacaccgcttcgcggcgcggcttaattcaggagttaaacatcatgagtattcaacatttccgtgtcgcccttattcccttttttgcggcattttgccttcctgtttttgctcacccagaaacgctggtgaaagtaaaagatgctgaagatcagttgggtgcacgagtgggttacatcgaactggatctcaacagcggtaagatccttgagagttttcgccccgaagaacgttttccaatgatgagcacttttaaagttctgctatgtggcgcggtattatcccgtattgacgccgggcaagagcaactcggtcgccgcatacactattctcagaatgacttggttgagtactcaccagtcacagaaaagcatcttacggatggcatgacagtaagagaattatgcagtgctgccataaccatgagtgataacactgcggccaacttacttctgacaacgatcggaggaccgaaggagctaaccgcttttttgcacaacatgggggatcatgtaactcgccttgatcgttgggaaccggagctgaatgaagccataccaaacgacgagcgtgacaccacgatgcctgtagcaatggcaacaacgttgcgcaaactattaactggcgaactacttactctagcttcccggcaacaattaatagactggatggaggcggataaagttgcaggaccacttctgcgctcggcccttccggctggctggtttattgctgataaatctggagccggtgagcgtggttctcgcggtatcattgcagcactggggccagatggtaagccctcccgtatcgtagttatctacacgacggggagtcaggcaactatggatgaacgaaatagacagatcgctgagataggtgcctcactgattaagcattggtaatgtctaacaattcgttcaagccgacgccgcttcgcggcgcggcttaactcaagcgttagatgctgcaggcatcgtggtgtcacgctcgtcgtttggtatggcttcattcagctccggttcccaacgatcaaggcgagttacatgatcccccatgttgtgcaaaaaagcggttagctccttcggtcctccgatcgaggatttttcggcgctgcgctacgtccgcgaccgcgttgagggatcaagccacagcagcccactcgaccttctagccgacccagacgagccaagggatctttttggaatgctgctccgtcgtcaggctttccgacgtttgggtggttgaacagaagtcattatcgcacggaatgccaagcactcccgaggggaaccctgtggttggcatgcacatacaaatggacgaacggataaaccttttcacgcccttttaaatatccgattattctaataaacgctcttttctcttaggtttacccgccaatatatcctgtcaaacactgatagtttaaactgaaggcgggaaacgacaatctcctaggttaggattttttttcacgaaattgcttcttgaaattacgtgatggattttgattctgatttatcttgtgattgttgactctacagatgcagatcttcgtcaagaccctcaccggaaagaccatcacccttgaggtggaaagctctgacaccatcgacaacgtcaaggccaagatccaggacaaggaaggaattcccccggatcagcaacgtctcatcttcgccggaaagcagctcgaggacggccgtaccctcgccgactacaacatccagaaggagtcaacccttcaccttgtccttcgtctccgtggtggcatgcagatcttcgtcaagactctcactggcaaaaccataaccctagaggtcgaaagctctgacaccattgacaacgtcaaggccaagatccaggacaaggagggaatccccccagaccagcaacgtctcatcttcgccggaaagcaacttgaggacgggcgcaccctcgccgactacaacatccagaaggaatcaacccttcacctcgtcctccgtctccgtggtggcatgcagatcttcgttaagaccctcaccggcaagactataaccctagaagtcgagagctccgacaccatcgacaacgtcaaggctaagatccaggacaaggagggtatccccccagaccagcagaggctgatcttcgccggcaagcagctcgaggacggacgtacccttgctgactacaacatccagaaggagtcaactctccacttggtgttgcgtcttcgtggtggtatgcagatcttcgtcaagacccttacgggtaagactattaccctcgaggtggagagctccgacaccattgacaatgtgaaggcgaagatccaggacaaggaaggaatcccaccggaccagcagaggcttatttttgctggcaaacagctagaggatggaaggaccctcgctgactacaacatccagaaggagtcaactctgcacttggtgttgcgtcttcgtggggggttttcaaatgctgctgatgaagtggcaactcaattactgaattttgacctcttgaagcttgccggtgatgttgagtctaaccctggaccaatggcgcaagttagcagaatctgcaatggtgtgcagaacccatctcttatctccaatctctcgaaatccagtcaacgcaaatctcccttatcggtttctctgaagacgcagcagcatccacgagcttatccgatttcgtcgtcgtggggattgaagaagagtgggatgacgttaattggctctgagcttcgtcctcttaaggtcatgtcttctgtttccacggcgtgcatgggggaagcggtgatcgccgaagtatcgactcaactatcagaggtagttggcgtcatcgagcgccatctcgaaccgacgttgctggccgtacatttgtacggctccgcagtggatggcggcctgaagccacacagtgatattgatttgctggttacggtgaccgtaaggcttgatgaaacaacgcggcgagctttgatcaacgaccttttggaaacttcggcttcccctggagagagcgagattctccgcgctgtagaagtcaccattgttgtgcacgacgacatcattccgtggcgttatccagctaagcgcgaactgcaatttggagaatggcagcgcaatgacattcttgcaggtatcttcgagccagccacgatcgacattgatctggctatcttgctgacaaaagcaagagaacatagcgttgccttggtaggtccagcggcggaggaactctttgatccggttcctgaacaggatctatttgaggcgctaaatgaaaccttaacgctatggaactcgccgcccgactgggctggcgatgagcgaaatgtagtgcttacgttgtcccgcatttggtacagcgcagtaaccggcaaaatcgcgccgaaggatgtcgctgccgactgggcaatggagcgcctgccggcccagtatcagcccgtcatacttgaagctagacaggcttatcttggacaagaagaagatcgcttggcctcgcgcgcagatcagttggaagaatttgtccactacgtgaaaggcgagatcaccaaggtagtcggcaaataagctggagctgatgtctgtgtgatgtctgatgttggattttcccagacattttaagaagaaatgtgatgtgtaatgggtctgtaatgacctttgaaaataagtttggtttgtgttgaactctattgtcccattaatgttactactgtttgttatcaatttgtggagctgatatataattatcaactgtatgctggcatattgtgtttgaattttgttctcaatccagtgaattggcgtatattagtgggttttttattcttcatgcttatcacggaggaaaagcagggatgagttgtgtgaaggatggtgatcatcccacgaattattagattttggtattataggttaaagatatttattaggtagggagaactcttggattagattctaaagtgatattttgaaaacacaccaaaggatttttgaacaaacggagatcatgatccctagtttcaattagctgccccttaccaagaggtagcaacttaaaaattatgctcgtgaagcatatttggtatcgtatataaattatgtaagcaatctgcttcagttggaacattaattggcttgcggaatgcacatttagatgatccacacaggtccacataaaaattcctaatcaattttagttatgcaatctttctgcttcaggtagtccttgtcttacagaaagcacattgagatgatccccacacagatccacataaaaaattcctaatcaataataacttgaaaatcattaaaagatgtaatgccatactaatccctaatttttgtgcaagtttttgtatactggaccccaaaaaataccaaaaagaaaaaacaagttattcagtgatatttttctgctccaatataaatttgattaccaaataccaaaaaataaaaacactattcagtggtatttttctgctccaatactggaccccaaattaatcagaatcggatccgtttaacagataaaaacaaaagcgatcgggttaaaatcccatttttacaaataacaacgcaggtttatacatgaaacaaatgtcattacctaggctggcagcacatcccccgttcgcgagctggcgtaacagcgaagaggcccgggcgcgccactgttaataatttttaaacgtcagcgcactaaaaaaacgaaaagacggacacgtgaaaataaaaaacacacactagtttatgacgcaatactattttacttatgatttgggtacattagacaaaaccgtgaaagagatgtatcagctatgaaacctgtatacttcaatacagagacttactcatatcggatacgtacgcacgaagtatcatattaattattttaatttttaataaatattttatcggatacttatgtgatactctacatatacacaaggatatttctaagatactttatagatacgtatcctagaaaaacatgaagagtaaaaaagtgagacaatgttgtaaaaattcattataaatgtatatgattcaattttagatatgcatcagtataattgattctcgatgaaacacttaaaattatatttcttgtggaagaacgtagcgagagaggtgattcagttagacaacattaaataaaattaatgttaagttcttttaatgatgtttctctcaatatcacatcatatgaaaatgtaatatgatttataagaaaatttttaaaaaatttattttaataatcacatgtactattttttaaaaattgtatcttttataataatacaataataaagagtaatcagtgttaatttttcttcaaatataagttttattataaatcattgttaacgtatcataagtcattaccgtatcgtatcttaatttttttttaaaaaccgctaattcacgtacccgtattgtattgtacccgcacctgtatcacaatcgatcttagttagaagaattgtctcgaggcggtgcaagacagcatataatagacgtggactctcttataccaaacgttgtcgtatcacaaagggttaggtaacaagtcacagtttgtccacgtgtcacgttttaattggaagaggtgccgttggcgtaatataacagccaatcgatttttgctataaaagcaaatcaggtaaactaaacttcttcattcttttcttccccatcgctacaaaaccggttcctttggaaaagagattcattcaaacctagcacccaattccgtttcaaggtataatctactttctattcttcgattattttattattattagctactatcgtttaatcgatcttttcttttgatccgtcaaatttaaattcaattagggttttgttcttttctttcatctgattgaaatccttctgaattgaaccgtttacttgattttactgtttattgtatgatttaatcctttgtttttcaaagacagtctttagattgtgattaggggttcatataaatttttagatttggatttttgtattgtatgattcaaaaaatacgtcctttaattagattagtacatggatattttttacccgatttattgattgtcagggagaatttgatgagcaagtttttttgatgtctgttgtaaattgaattgattataattgctgatctgctgcttccagttttcataacccatattcttttaaccttgttgtacacacaatgaaaaattggtgattgattcatttgtttttctttgttttggattatacagggtggtaccaaaaaatggcgggatctaagaagagaagaattaaacaagattccaagctggagaagtttacaaactgttacagcctctccaaaaccctcaggtttaaagcgatcccggtgggcaagacccaggagaacatcgacaacaagaggctcctggtggaagacgagaagcgcgccgaagactacaagggcgtgaagaagctgctcgataggtactacctcagctttattaacgacgtgctgcacagcatcaaactcaagaatctcaacaactacatctccctcttccgcaaaaagacccgcaccgagaaggagaacaaggagctggagaacctggagatcaacctccgcaaggaaatcgccaaagcgttcaagggcaatgaagggtacaagagcctcttcaagaaagacatcatcgaaactatcctcccagagtttctcgatgacaaggacgagatcgcgctggtgaactcctttaacgggttcacaaccgcgtttaccggcttctttgataacagggaaaatatgttctccgaggaggccaagtccaccagcatcgccttcaggtgtatcaacgagaacctcacccgctacatttccaatatggacattttcgagaaggtggatgcgatcttcgataagcacgaggtgcaggagatcaaagagaagattctcaattccgattatgacgtcgaggatttcttcgaaggggagttctttaattttgtgctcacacaagagggcattgacgtgtacaacgcgattatcgggggcttcgtcacagagtccggggagaagattaaggggctgaatgagtacatcaatctgtacaatcagaagaccaagcagaaactgccgaaattcaagccgctctacaagcaagtcctgtccgatagggaaagcctctccttctacggcgagggctataccagcgacgaggaggtgctggaagtcttccgcaacacactgaataagaatagcgagattttctcctccatcaagaagctcgagaagctctttaagaactttgacgagtacagctccgccgggattttcgtgaagaacgggccggcgatcagcaccatctccaaggacatctttggcgagtggaacgtcatcagggacaagtggaacgccgagtacgacgacatccacctgaagaagaaggcggtggtgaccgagaagtatgaggacgatcgcaggaagtccttcaaaaaaatcggctccttcagcctcgaacagctccaggagtatgccgatgcggatctgtccgtcgtcgagaagctgaaggaaatcatcattcagaaggtcgacgagatctataaagtgtacgggtccagcgagaagctgttcgacgccgactttgtgctcgagaagtccctcaaaaagaatgacgccgtggtggccattatgaaagacctgctcgactccgtgaagtccttcgaaaattacattaaagcgttctttggggaggggaaggaaactaacagggatgagtccttctatggcgactttgtcctcgcgtacgacatcctgctgaaggtcgaccacatttacgacgcgatccgcaactacgtgacacagaagccgtactccaaagacaagttcaagctgtacttccagaacccgcaatttatggggggctgggacaaggataaagagacagactaccgcgcgacaattctccgctatggctccaaatactatctggccatcatggacaagaagtacgcgaagtgcctgcagaagatcgacaaagacgacgtcaatggcaactatgaaaagatcaactacaagctgctgccgggcccgaacaagatgctcccgaaggtgttcttcagcaagaagtggatggcctactacaatccaagcgaggatattcagaaaatctataaaaacgggaccttcaagaagggggacatgtttaacctcaacgactgccacaagctcattgatttcttcaaggatagcatttcccgctacccgaaatggtccaatgcgtacgattttaacttctccgagacagaaaagtacaaagacatcgcgggcttttacagggaggtggaggagcaagggtataaagtttcttttgaatccgcgagcaagaaggaagtcgacaagctcgtcgaggagggcaagctctacatgttccaaatttataacaaggacttttccgacaagagccatgggaccccaaacctccacaccatgtacttcaaactgctctttgacgagaacaaccacgggcaaatcaggctgagcggcggcgccgaattattcatgcgcagggcctccctcaagaaggaagagctggtcgtccatccagccaattccccgatcgcgaacaagaacccggacaatccgaaaaagaccaccaccctgtcctacgacgtctacaaggacaaacgcttcagcgaagaccagtacgaattacacatcccaattgcgattaataagtgcccaaagaatatcttcaaaattaatacagaggtcagggtgctgctcaaacacgacgacaatccgtatgtcatcggcattgacaggggcgagcgcaatctgctctatatcgtggtcgtggatgggaagggcaatattgtggagcagtactccctgaacgagattatcaacaacttcaatgggattaggattaagaccgactatcacagcctgctcgacaagaaagaaaaagagaggtttgaggcccgccaaaactggacctccattgagaatatcaaagaattaaaggccggctatatttcccaagtcgtccacaagatctgcgagctggtggagaaatatgacgccgtgattgcgctcgaagacttaaattctgggttcaagaactcccgcgtgaaggtggaaaaacaggtgtatcagaaattcgagaaaatgctgatcgacaaactcaattatatggtggataagaagtccaacccgtgtgccacagggggcgcgctgaagggctatcagatcaccaacaagttcgagagcttcaagagcatgagcacccagaacgggtttattttctacatcccggcgtggctcacctccaagattgacccgagcaccggcttcgtgaacctcctgaagacaaagtatacctccattgccgacagcaagaagtttatctcctccttcgaccgcattatgtatgtgccggaggaggacctcttcgagttcgccctcgactacaaaaacttcagccgcacagatgcggattacatcaagaagtggaagctgtactcctacgggaacaggatccgcatcttcaggaatccaaaaaaaaataacgtctttgactgggaggaagtgtgcctgacatccgcctacaaggaactgttcaataaatacggcatcaattaccagcagggcgacattcgcgccctcctctgtgagcagtccgacaaagcgttttactccagcttcatggccctcatgtccctgatgctccaaatgaggaatagcatcacagggcgcaccgacgtcgacttcctcatcagcccggtgaagaactccgacgggatcttttacgactcccgcaactatgaggcgcaagagaatgcgatcctcccgaagaacgccgatgcgaacggggcctataatatcgccaggaaagtgctctgggccatcgggcagttcaaaaaggcggaggatgagaagctcgacaaggtgaaaattgccatttccaacaaggagtggctggagtacgcgcagacctccgtgaagcacggatctaagaagagaagaattaaacaagattgacttaattaaagggctctctgtcatgatttcatactttcattattgagctctgtaattacaattatgaccatgagaacatctcttattgtgtggccttttaattgctgatgttagtactgaaccaaagcttatcgtgatgatgtaaaagcaataagtacttgtttgtagcttctttgtgtctccctttgggcttaatacatctgtttagtgttgtggctttggcatagacttctcttggtaataatgccttgcaatgcaaaatttcaattatcaaattctattatgttctcaccttatggtaacagcttaccctgtggaagatgagattcttgagttgagtcattgccaatttttggcattagcttttgaattagtgaattttgacaaaaattaccgtgacactgattttgttgaagctcttaagtgtagtttttacaaaatttcagtggctcgttgtgattatgtcaaactcacggcgaatgtagttcttacagaatttcagtggctcgggcccggccgtgacggccacgagcgaactcctgcaggctcgaggtcattcatatgcttgagaagagagtcgggatagtccaaaataaaacaaaggtaagattacctggtcaaaagtgaaaacatcagttaaaaggtggtataaagtaaaatatcggtaataaaaggtggcccaaagtgaaatttactcttttctactattataaaaattgaggatgtttttgtcggtactttgatacgtcatttttgtatgaattggtttttaagtttattcgcttttggaaatgcatatctgtatttgagtcgggttttaagttcgtttgcttttgtaaatacagagggatttgtataagaaatatctttagaaaaacccatatgctaatttgacataatttttgagaaaaatatatattcaggcgaattctcacaatgaacaataataagattaaaatagctttcccccgttgcagcgcatgggtattttttctagtaaaaataaaagataaacttagactcaaaacatttacaaaaacaacccctaaagttcctaaagcccaaagtgctatccacgatccatagcaagcccagcccaacccaacccaacccaacccaccccagtccagccaactggacaatagtctccacacccccccactatcaccgtgagttgtccgcacgcaccgcacgtctcgcagccaaaaaaaaaaagaaagaaaaaaaagaaaaagaaaaaacagcaggtgggtccgggtcgtgggggccggaaacgcgaggaggatcgcgagccagcgacgaggagcttaggcctcatcgttgaagatgcctctgccgacagtggtcccaaagatggacccccacccacgaggagcatcgtggaaaaagaagacgttccaaccacgtcttcaaagcaagtggattgatgtgatatctccactgacgtaagggatgacgcacaatcccactatccttcgaggcctcatcgttgaagatgcctctgccgacagtggtcccaaagatggacccccacccacgaggagcatcgtggaaaaagaagacgttccaaccacgtcttcaaagcaagtggattgatgtgatatctccactgacgtaagggatgacgcacaatcccactatccttcgaagctccctccctccgcttccaaagaaacgccccccatcgccactatatacatacccccccctctcctcccatccccccaacccttctagaaccatcttccacacactcaagccacactattggagaacacacagggacaacacaccataagatccaagggaggcctccgccgccgccggtaaccaccccgcccctctcctctttctttctccgtttttttttccgtctcggtctcgatctttggccttggtagtttgggtgggcgagaggcggcttcgtgcgcgcccagatcggtgcgcgggaggggcgggatctcgcggctggggctctcgccggcgtggatccggcccggatctcgcggggaatggggctctcggatgtagatctgcgatccgccgttgttgggggagatgatggggggtttaaaatttccgccgtgctaaacaagatcaggaagaggggaaaagggcactatggtttatatttttatatatttctgctgcttcgtcaggcttagatgtgctagatctttctttcttctttttgtgggtagaatttgaatccctcagcattgttcatcggtagtttttcttttcatgatttgtgacaaatgcagcctcgtgcggagcttttttgtaggtagaaggcggccgcatggcccagtctaagcacgggttgacgaaggagatgactatgaagtatcgcatggaaggctgcgttgacggccacaaattcgtcattaccggcgagggcatcggctacccctttaaggtaagtttctgcttctacctttgatatatatataataattatcattaattagtagtaatataatatttcaaatatttttttcaaaataaaagaatgtagtatatagcaattgcttttctgtagtttataagtgtgtatattttaatttataacttttctaatatatgaccaaaatttgttgatgtgcagggcaagcaagcgataaacctgtgcgtggtggagggtggccctctgcccttcgccgaggatatactctcagccgccttcatgtacgggaatcgggtgttcacggagtacccgcaagacatcgtggactacttcaagaactcctgccccgccggatacacatgggaccgttccttcctcttcgaggacggagccgtttgcatctgcaacgcggacatcaccgtgtccgtcgaggagaactgcatgtaccacgagtcaaagttctatggagtgaacttcccggccgatggtcccgtgatgaagaaaatgacggacaactgggagccgtcgtgcgagaaaatcattcccgtcccaaaacagggaatcctcaagggcgacgtgtcgatgtacctacttctcaaggacggtggacggctacggtgccagttcgacactgtttacaaggcgaagtcggtgccgaggaagatgccggactggcactttatccagcacaagctgacaagggaggacagaagcgacgctaagaaccagaaatggcacctcaccgagcacgccatcgccagtggctctgcgctgcccgggtgaccctgcaatgtgaccctagacttgtccatcttctggattggccaacttaattaatgtatgaaataaaaggatgcacacatagtgacatgctaatcactataatgtgggcatcaaagttgtgtgttatgtgtaattactaattatctgaataagagaaagagatcatccatatttcttatcctaaatgaatgtcacgtgtctttataattctttgatgaaccagatgcattttattaaccaattccatatacatataaatattaatcatatataattaatatcaattgggttagcaaaacaaatctagtctaggtgtgttttgctaattattgggggatagtgcaaaaagaaatctacgttctcaataattcagatagaaaacttaataaagtgagataatttacatagattgcttttatcctttgatatatgtgaaaccatgcatgatataaggaaaatagatagagaaataattttttacatcgttgaatatgtaaacaatttaattcaagaagctaggaatataaatattgaggagtttatgattattattattattttgatgttcaatgaagttttttttaatttcatatgaagtatacaaaaattcttcatagatttttgtttctatgccgtagttatctttaatatatttgtggttgaagaaatttattgctagaaacgaatggattgtcaatttttttttaaagcaaatatatatgaaattatactgtatattattttagtcatgattaaaatgtggccttaattgaatcatctttctcattcattttttcaaaagcatatcaggatgattgatatttatctattttaaaaattaatttaagggttcaaattaaatttaacttaaaagtgtcctaaccgtagttaaaggtttactttaaaaaaatactatgaaaaatctaatcttctatgaatcgagggcccttagctagttag

SEQ ID NO: 84 - DNA, 18920 bp, synthetic construct
  misc_feature 1..18920: note = pWISE3777 Full plasmid sequence
  source 1..18920: mol_type = other DNA
aagcttcgataaaaatgttttaaacgatatatattataaaaaaaaacgtttcaaaaataaatacaaaaatgtttttaaatatatataatttaactcattaaagaaaataaaaatgcaagtgcggtgacaagacaagctaaaagttgcaaaagaaatggcagggctataaggctcacctactcctggatttaccaaattttggttcgtccctatactcgaaaaataaaacaaaataaatttcagtatcttcgtttttgtatgctttgactgtgaggcgaggccaactttcttcttctgtctgagatgaattttgtttgcctcctgtgaaggatgtatcattcaaagtgaatgttttgcaactgccagtagtcccacatcgaccaaatattcttattacagtgtgtttatatagcacctggagaaggaatgggttgtttcaaagattaaataatttctactaagtgtagatttgtaaccaacatcccctgatgataatttctactaagtgtagattttttttactagtgatatccgtcgactggtacctacgcgtagctagcccgtgaagtttctcatctaagcccccatttggacgtgaatgtagacacgtcgaaataaagatttccgaattagaataatttgtttattgctttcgcctataaatacgacggatcgtaatttgtcgttttatcaaaatgtactttcattttataataacgctgcggacatctacatttttgaattgaaaaaaaattggtaattactctttctttttctccatattgaccatcatactcattgctgatccatgtagatttcccggacatgaagccatttacaattgaatatatcctgccgccgctgccgctttgcacccggtggagcttgcatgttggtttctacgcagaactgagccggttaggcagataatttccattgagaactgagccatgtgcaccttccccccaacacggtgagcgacggggcaacggagtgatccacatgggacttttcctagcttggctgccatttttggggtgaggccgttcgcggccgaggggcgcagcccctggggggatgggaggcccgcgttagcgggccgggagggttcgagaagggggggcaccccccttcggcgtgcgcggtcacgcgcacagggcgcagccctggttaaaaacaaggtttataaatattggtttaaaagcaggttaaaagacaggttagcggtggccgaaaaacgggcggaaacccttgcaaatgctggattttctgcctgtggacagcccctcaaatgtcaataggtgcgcccctcatctgtcagcactctgcccctcaagtgtcaaggatcgcgcccctcatctgtcagtagtcgcgcccctcaagtgtcaataccgcagggcacttatccccaggcttgtccacatcatctgtgggaaactcgcgtaaaatcaggcgttttcgccgatttgcgaggctggccagctccacgtcgccggccgaaatcgagcctgcccctcatctgtcaacgccgcgccgggtgagtcggcccctcaagtgtcaacgtccgcccctcatctgtcagtgagggccaagttttccgcgaggtatccacaacgccggcggccggccgcggtgtctcgcacacggcttcgacggcgtttctggcgcgtttgcagggccatagacggccgccagcccagcggcgagggcaaccagcccggtgagcgtcggaaagggtcgatcgaccgatgcccttgagagccttcaacccagtcagctccttccggtgggcgcggggcatgactatcgtcgccgcacttatgactgtcttctttatcatgcaactcgtaggacaggtgccggcagcgctctgggtcattttcggcgaggaccgctttcgctggagcgcgacgatgatcggcctgtcgcttgcggtattcggaatcttgcacgccctcgctcaagccttcgtcactggtcccgccaccaaacgtttcggcgagaagcaggccattatcgccggcatggcggccgacgcgctgggctacgtcttgctggcgttcgcgacgcgaggctggatggccttccccattatgattcttctcgcttccggcggcatcgggatgcccgcgttgcaggccatgctgtccaggcaggtagatgacgaccatcagggacagcttcaaggatcgctcgcggctcttaccagcctaacttcgatcattggaccgctgatcgtcacggcgatttatgccgcctcggcgagcacatggaacgggttggcatggattgtaggcgccgccctataccttgtctgcctccccgcgttgcgtcgcggtgcatggagccgggccacctcgacctgaatggaagccggcggcacctcgctaacggattcaccactccaagaattggagccaatcaattcttgcggagaactgtgaatgcgcaaaccaacccttggcagaacatatccatcgcgtccgccatctccagcagccgcacgcggcgcatctcgggcagcgttgggtcctggccacgggtgcgcatgatcgtgctcctgtcgttgaggacccggctaggctggcggggttgccttactggttagcagaatgaatcaccgatacgcgagcgaacgtgaagcgactgctgctgcaaaacgtctgcgacctgagcaacaacatgaatggtcttcggtttccgtgtttcgtaaagtctggaaacgcggaagtcagcgccctgcaccattatgttccggatctgcatcgcaggatgctgctggctaccctgtggaacacctacatctgtattaacgaagcgctggcattgaccctgagtgatttttctctggtcccgccgcatccataccgccagttgtttaccctcacaacgttccagtaaccgggcatgttcatcatcagtaacccgtatcgtgagcatcctctctcgtttcatcggtatcattacccccatgaacagaaatcccccttacacggaggcatcagtgaccaaacaggaaaaaaccgcccttaacatggcccgctttatcagaagccagacattaacgcttctggagaaactcaacgagctggacgcggatgaacaggcagacatctgtgaatcgcttcacgaccacgctgatgagctttaccgcagctgcctcgcgcgtttcggtgatgacggtgaaaacctctgacacatgcagctcccggagacggtcacagcttgtctgtaagcggatgccgggagcagacaagcccgtcagggcgcgtcagcgggtgttggcgggtgtcggggcgcagccatgacccagtcacgtagcgatagcggagtgtatactggcttaactatgcggcatcagagcagattgtactgagagtgcaccatatgcggtgtgaaataccgcacagatgcgtaaggagaaaataccgcatcaggcgctcttccgcttcctcgctcactgactcgctgcgctcggtcgttcggctgcggcgagcggtatcagctcactcaaaggcggtaatacggttatccacagaatcaggggataacgcaggaaagaacatgtgagcaaaaggccagcaaaaggccaggaaccgtaaaaaggccgcgttgctggcgtttttccataggctccgcccccctgacgagcatcacaaaaatcgacgctcaagtcagaggtggcgaaacccgacaggactataaagataccaggcgtttccccctggaagctccctcgtgcgctctcctgttccgaccctgccgcttaccggatacctgtccgcctttctcccttcgggaagcgtggcgctttctcatagctcacgctgtaggtatctcagttcggtgtaggtcgttcgctccaagctgggctgtgtgcacgaaccccccgttcagcccgaccgctgcgccttatccggtaactatcgtcttgagtccaacccggtaagacacgacttatcgccactggcagcagccactggtaacaggattagcagagcgaggtatgtaggcggtgctacagagttcttgaagtggtggcctaactacggctacactagaaggacagtatttggtatctgcgctctgctgaagccagttaccttcggaaaaagagttggtagctcttgatccggcaaacaaaccaccgctggtagcggtggtttttttgtttgcaagcagcagattacgcgcagaaaaaaaggatctcaagaagatcctttgatcttttctacggggtctgacgctcagtggaacgaaaactcacgttaagggattttggtcatgagattatcaaaaaggatcttcacctagatccttttaaattaaaaatgaagttttaaatcaatctaaagtatatatgagtaaacttggtctgacagttaccaatgcttaatcagtgaggcacctatctcagcgatctgtctatttcgttcatccatagttgcctgactccccgtcgtgtagataactacgatacgggagggcttaccatctggccccagtgctgcaatgataccgcgagacccacgctcaccggctccagatttatcagcaataaaccagccagccggaagggccgagcgcagaagtggtcctgcaactttatccgcctccatccagtctattaattgttgccgggaagctagagtaagtagttcgccagttaatagtttgcgcaacgttgttgccattgctgcaggtcgggagcacaggatgacgcctaacaattcattcaagccgacaccgcttcgcggcgcggcttaattcaggagttaaacatcatgagtattcaacatttccgtgtcgcccttattcccttttttgcggcattttgccttcctgtttttgctcacccagaaacgctggtgaaagtaaaagatgctgaagatcagttgggtgcacgagtgggttacatcgaactggatctcaacagcggtaagatccttgagagttttcgccccgaagaacgttttccaatgatgagcacttttaaagttctgctatgtggcgcggtattatcccgtattgacgccgggcaagagcaactcggtcgccgcatacactattctcagaatgacttggttgagtactcaccagtcacagaaaagcatcttacggatggcatgacagtaagagaattatgcagtgctgccataaccatgagtgataacactgcggccaacttacttctgacaacgatcggaggaccgaaggagctaaccgcttttttgcacaacatgggggatcatgtaactcgccttgatcgttgggaaccggagctgaatgaagccataccaaacgacgagcgtgacaccacgatgcctgtagcaatggcaacaacgttgcgcaaactattaactggcgaactacttactctagcttcccggcaacaattaatagactggatggaggcggataaagttgcaggaccacttctgcgctcggcccttccggctggctggtttattgctgataaatctggagccggtgagcgtggttctcgcggtatcattgcagcactggggccagatggtaagccctcccgtatcgtagttatctacacgacggggagtcaggcaactatggatgaacgaaatagacagatcgctgagataggtgcctcactgattaagcattggtaatgtctaacaattcgttcaagccgacgccgcttcgcggcgcggcttaactcaagcgttagatgctgcaggcatcgtggtgtcacgctcgtcgtttggtatggcttcattcagctccggttcccaacgatcaaggcgagttacatgatcccccatgttgtgcaaaaaagcggttagctccttcggtcctccgatcgaggatttttcggcgctgcgctacgtccgcgaccgcgttgagggatcaagccacagcagcccactcgaccttctagccgacccagacgagccaagggatctttttggaatgctgctccgtcgtcaggctttccgacgtttgggtggttgaacagaagtcattatcgcacggaatgccaagcactcccgaggggaaccctgtggttggcatgcacatacaaatggacgaacggataaaccttttcacgcccttttaaatatccgattattctaataaacgctcttttctcttaggtttacccgccaatatatcctgtcaaacactgatagtttaaactgaaggcgggaaacgacaatctcctaggttggtgtgaaacagatgatttgctgctgtaacaaagtaaattatgtctcgacttttaaggcccctttcattttattagattattttattttaattaatgttcttgtcccattttgcaacagatggatgctactacacccaagtattccaaggccaggtatgatgaaattgtgaaggaagtctcttcctacttgaagaaagtaggatacaaccctgacaagattccttttgttcctatctctggttttgagggagacaacatgattgagaggtccacaaaccttgactggtacaagggtccaactctgcttgatgcacttgaccagattagtgagcccaagaggccctctgacaagcccctcaggcttccccttcaggatgtgtacaagattggaggtattggaactgtgccagtgggacgtgttgagaccggtgtcttgaagcctggaatggtggtgacttttgcaccaactggactgacaactgaagtcaagtctgtggagatgcaccatgaatctcttacagaggcacatcctggtgacaatgtgggattcaatgttaagaatgttgctgttaaggatttgaagcgtggttatgttgcctcaaactcaaaggatgaccctgcaaaggaggctgctaacttcacagcccaagtcatcatcatgaaccaccctggtcagattggaaatggctatgcccctgtcctcgactgccacacttctcacattgctgtcaagtttgctgaactcatgaccaagattgacaggcgatccggcaaagagcttgagaaggagcccaagtttttgaagaacggtgatgctggttttgttaagatgattccaaccaaacccatggttgttgaaactttctccgagtatcctccacttggtaggtttgctgttagggacatgcgtcaaactgttgctgtgggagtcatcaagaacgttgagaagaaggatcctaccggagccaaggtcaccaaggctgcccagaagaagaagtcaaatgctgctgatgaagtggcaactcaattactgaattttgacctcttgaagcttgccggtgatgttgagtctaaccctggaccaatggcgcaagttagcagaatctgcaatggtgtgcagaacccatctcttatctccaatctctcgaaatccagtcaacgcaaatctcccttatcggtttctctgaagacgcagcagcatccacgagcttatccgatttcgtcgtcgtggggattgaagaagagtgggatgacgttaattggctctgagcttcgtcctcttaaggtcatgtcttctgtttccacggcgtgcatgggggaagcggtgatcgccgaagtatcgactcaactatcagaggtagttggcgtcatcgagcgccatctcgaaccgacgttgctggccgtacatttgtacggctccgcagtggatggcggcctgaagccacacagtgatattgatttgctggttacggtgaccgtaaggcttgatgaaacaacgcggcgagctttgatcaacgaccttttggaaacttcggcttcccctggagagagcgagattctccgcgctgtagaagtcaccattgttgtgcacgacgacatcattccgtggcgttatccagctaagcgcgaactgcaatttggagaatggcagcgcaatgacattcttgcaggtatcttcgagccagccacgatcgacattgatctggctatcttgctgacaaaagcaagagaacatagcgttgccttggtaggtccagcggcggaggaactctttgatccggttcctgaacaggatctatttgaggcgctaaatgaaaccttaacgctatggaactcgccgcccgactgggctggcgatgagcgaaatgtagtgcttacgttgtcccgcatttggtacagcgcagtaaccggcaaaatcgcgccgaaggatgtcgctgccgactgggcaatggagcgcctgccggcccagtatcagcccgtcatacttgaagctagacaggcttatcttggacaagaagaagatcgcttggcctcgcgcgcagatcagttggaagaatttgtccactacgtgaaaggcgagatcaccaaggtagtcggcaaatgaatcgtgcgggctggttcatcagggaatgttggctacaatcaatgttggtttcttttctgtactcttgtgtcttcttttctaggtagcttgtttttcggacaaagtttgaagtctccaccatcatctcgcaactgttgttcccagaactgggttcttgatcgacggtggcaaaattgcttttatttatctgtgttttaatgtgttgtgtttgtcggaacccctgattacatttttgttaagcgcagcgagtttcaggactttgctgcgttgtgttgctttggtttattaaatgtcaactttctatttgtagtgttcaatttttggcttggtttgctttttctttataatttgtgttcaaattttggcttggtttgcttttactataatttgtgttcaaattttgggttggattttttaacgatcggctgtttgctcttcttcctctgttttgatgtgttcgtgactatgcaagaatcttcaattttgctaaaataaacttgctttgacaacatagaatcaaatccgagtgctttaatattcggtggtttgtttttatttttggttttatgaaagttaaaattttaaaagtaaatcgataaggtataattgtggtttttatttatcgagaattttttaagtgaatcgatataatttatttcccctaaaataaaataccaaagaatcgaattcgaactttgtctttaataaaactactaatttaatcattatttgttctgtgtaagcatgagaaataaattctacttatcttttagtttaaaaccaaaacaggttaagaataatttttctaaggccgttatcaaggtcaccaaaaatctattcgatctgaccatatattttcgatacttgtacgattcgcagatgttgattggaaattgcaatgaataaattacaaatgccaaatccgattatgcaatgaatgaattacaagtgcatttatccgttttgaatctgttcatgtctaccaatgggagagatttttttcctgcatctgccatacatatgggaagaccgaaaatactttcctaggctggcagcacatcccccgttcgcgagctggcgtaacagcgaagaggcccgggcgcgccactgttaataatttttaaacgtcagcgcactaaaaaaacgaaaagacggacacgtgaaaataaaaaacacacactagtttatgacgcaatactattttacttatgatttgggtacattagacaaaaccgtgaaagagatgtatcagctatgaaacctgtatacttcaatacagagacttactcatatcggatacgtacgcacgaagtatcatattaattattttaatttttaataaatattttatcggatacttatgtgatactctacatatacacaaggatatttctaagatactttatagatacgtatcctagaaaaacatgaagagtaaaaaagtgagacaatgttgtaaaaattcattataaatgtatatgattcaattttagatatgcatcagtataattgattctcgatgaaacacttaaaattatatttcttgtggaagaacgtagcgagagaggtgattcagttagacaacattaaataaaattaatgttaagttcttttaatgatgtttctctcaatatcacatcatatgaaaatgtaatatgatttataagaaaatttttaaaaaatttattttaataatcacatgtactattttttaaaaattgtatcttttataataatacaataataaagagtaatcagtgttaatttttcttcaaatataagttttattataaatcattgttaacgtatcataagtcattaccgtatcgtatcttaatttttttttaaaaaccgctaattcacgtacccgtattgtattgtacccgcacctgtatcacaatcgatcttagttagaagaattgtctcgaggcggtgcaagacagcatataatagacgtggactctcttataccaaacgttgtcgtatcacaaagggttaggtaacaagtcacagtttgtccacgtgtcacgttttaattggaagaggtgccgttggcgtaatataacagccaatcgatttttgctataaaagcaaatcaggtaaactaaacttcttcattcttttcttccccatcgctacaaaaccggttcctttggaaaagagattcattcaaacctagcacccaattccgtttcaaggtataatctactttctattcttcgattattttattattattagctactatcgtttaatcgatcttttcttttgatccgtcaaatttaaattcaattagggttttgttcttttctttcatctgattgaaatccttctgaattgaaccgtttacttgattttactgtttattgtatgatttaatcctttgtttttcaaagacagtctttagattgtgattaggggttcatataaatttttagatttggatttttgtattgtatgattcaaaaaatacgtcctttaattagattagtacatggatattttttacccgatttattgattgtcagggagaatttgatgagcaagtttttttgatgtctgttgtaaattgaattgattataattgctgatctgctgcttccagttttcataacccatattcttttaaccttgttgtacacacaatgaaaaattggtgattgattcatttgtttttctttgttttggattatacagggtggtaccaaaaaatggcgggatctaagaagagaagaattaaacaagattccaagctggagaagtttacaaactgttacagcctctccaaaaccctcaggtttaaagcgatcccggtgggcaagacccaggagaacatcgacaacaagaggctcctggtggaagacgagaagcgcgccgaagactacaagggcgtgaagaagctgctcgataggtactacctcagctttattaacgacgtgctgcacagcatcaaactcaagaatctcaacaactacatctccctcttccgcaaaaagacccgcaccgagaaggagaacaaggagctggagaacctggagatcaacctccgcaaggaaatcgccaaagcgttcaagggcaatgaagggtacaagagcctcttcaagaaagacatcatcgaaactatcctcccagagtttctcgatgacaaggacgagatcgcgctggtgaactcctttaacgggttcacaaccgcgtttaccggcttctttgataacagggaaaatatgttctccgaggaggccaagtccaccagcatcgccttcaggtgtatcaacgagaacctcacccgctacatttccaatatggacattttcgagaaggtggatgcgatcttcgataagcacgaggtgcaggagatcaaagagaagattctcaattccgattatgacgtcgaggatttcttcgaaggggagttctttaattttgtgctcacacaagagggcattgacgtgtacaacgcgattatcgggggcttcgtcacagagtccggggagaagattaaggggctgaatgagtacatcaatctgtacaatcagaagaccaagcagaaactgccgaaattcaagccgctctacaagcaagtcctgtccgatagggaaagcctctccttctacggcgagggctataccagcgacgaggaggtgctggaagtcttccgcaacacactgaataagaatagcgagattttctcctccatcaagaagctcgagaagctctttaagaactttgacgagtacagctccgccgggattttcgtgaagaacgggccggcgatcagcaccatctccaaggacatctttggcgagtggaacgtcatcagggacaagtggaacgccgagtacgacgacatccacctgaagaagaaggcggtggtgaccgagaagtatgaggacgatcgcaggaagtccttcaaaaaaatcggctccttcagcctcgaacagctccaggagtatgccgatgcggatctgtccgtcgtcgagaagctgaaggaaatcatcattcagaaggtcgacgagatctataaagtgtacgggtccagcgagaagctgttcgacgccgactttgtgctcgagaagtccctcaaaaagaatgacgccgtggtggccattatgaaagacctgctcgactccgtgaagtccttcgaaaattacattaaagcgttctttggggaggggaaggaaactaacagggatgagtccttctatggcgactttgtcctcgcgtacgacatcctgctgaaggtcgaccacatttacgacgcgatccgcaactacgtgacacagaagccgtactccaaagacaagttcaagctgtacttccagaacccgcaatttatggggggctgggacaaggataaagagacagactaccgcgcgacaattctccgctatggctccaaatactatctggccatcatggacaagaagtacgcgaagtgcctgcagaagatcgacaaagacgacgtcaatggcaactatgaaaagatcaactacaagctgctgccgggcccgaacaagatgctcccgaaggtgttcttcagcaagaagtggatggcctactacaatccaagcgaggatattcagaaaatctataaaaacgggaccttcaagaagggggacatgtttaacctcaacgactgccacaagctcattgatttcttcaaggatagcatttcccgctacccgaaatggtccaatgcgtacgattttaacttctccgagacagaaaagtacaaagacatcgcgggcttttacagggaggtggaggagcaagggtataaagtttcttttgaatccgcgagcaagaaggaagtcgacaagctcgtcgaggagggcaagctctacatgttccaaatttataacaaggacttttccgacaagagccatgggaccccaaacctccacaccatgtacttcaaactgctctttgacgagaacaaccacgggcaaatcaggctgagcggcggcgccgaattattcatgcgcagggcctccctcaagaaggaagagctggtcgtccatccagccaattccccgatcgcgaacaagaacccggacaatccgaaaaagaccaccaccctgtcctacgacgtctacaaggacaaacgcttcagcgaagaccagtacgaattacacatcccaattgcgattaataagtgcccaaagaatatcttcaaaattaatacagaggtcagggtgctgctcaaacacgacgacaatccgtatgtcatcggcattgacaggggcgagcgcaatctgctctatatcgtggtcgtggatgggaagggcaatattgtggagcagtactccctgaacgagattatcaacaacttcaatgggattaggattaagaccgactatcacagcctgctcgacaagaaagaaaaagagaggtttgaggcccgccaaaactggacctccattgagaatatcaaagaattaaaggccggctatatttcccaagtcgtccacaagatctgcgagctggtggagaaatatgacgccgtgattgcgctcgaagacttaaattctgggttcaagaactcccgcgtgaaggtggaaaaacaggtgtatcagaaattcgagaaaatgctgatcgacaaactcaattatatggtggataagaagtccaacccgtgtgccacagggggcgcgctgaagggctatcagatcaccaacaagttcgagagcttcaagagcatgagcacccagaacgggtttattttctacatcccggcgtggctcacctccaagattgacccgagcaccggcttcgtgaacctcctgaagacaaagtatacctccattgccgacagcaagaagtttatctcctccttcgaccgcattatgtatgtgccggaggaggacctcttcgagttcgccctcgactacaaaaacttcagccgcacagatgcggattacatcaagaagtggaagctgtactcctacgggaacaggatccgcatcttcaggaatccaaaaaaaaataacgtctttgactgggaggaagtgtgcctgacatccgcctacaaggaactgttcaataaatacggcatcaattaccagcagggcgacattcgcgccctcctctgtgagcagtccgacaaagcgttttactccagcttcatggccctcatgtccctgatgctccaaatgaggaatagcatcacagggcgcaccgacgtcgacttcctcatcagcccggtgaagaactccgacgggatcttttacgactcccgcaactatgaggcgcaagagaatgcgatcctcccgaagaacgccgatgcgaacggggcctataatatcgccaggaaagtgctctgggccatcgggcagttcaaaaaggcggaggatgagaagctcgacaaggtgaaaattgccatttccaacaaggagtggctggagtacgcgcagacctccgtgaagcacggatctaagaagagaagaattaaacaagattgacttaattaaagggctctctgtcatgatttcatactttcattattgagctctgtaattacaattatgaccatgagaacatctcttattgtgtggccttttaattgctgatgttagtactgaaccaaagcttatcgtgatgatgtaaaagcaataagtacttgtttgtagcttctttgtgtctccctttgggcttaatacatctgtttagtgttgtggctttggcatagacttctcttggtaataatgccttgcaatgcaaaatttcaattatcaaattctattatgttctcaccttatggtaacagcttaccctgtggaagatgagattcttgagttgagtcattgccaatttttggcattagcttttgaattagtgaattttgacaaaaattaccgtgacactgattttgttgaagctcttaagtgtagtttttacaaaatttcagtggctcgttgtgattatgtcaaactcacggcgaatgtagttcttacagaatttcagtggctcgggcccggccgtgacggccacgagcgaactcctgcaggctcgaggtcattcatatgcttgagaagagagtcgggatagtccaaaataaaacaaaggtaagattacctggtcaaaagtgaaaacatcagttaaaaggtggtataaagtaaaatatcggtaataaaaggtggcccaaagtgaaatttactcttttctactattataaaaattgaggatgtttttgtcggtactttgatacgtcatttttgtatgaattggtttttaagtttattcgcttttggaaatgcatatctgtatttgagtcgggttttaagttcgtttgcttttgtaaatacagagggatttgtataagaaatatctttagaaaaacccatatgctaatttgacataatttttgagaaaaatatatattcaggcgaattctcacaatgaacaataataagattaaaatagctttcccccgttgcagcgcatgggtattttttctagtaaaaataaaagataaacttagactcaaaacatttacaaaaacaacccctaaagttcctaaagcccaaagtgctatccacgatccatagcaagcccagcccaacccaacccaacccaacccaccccagtccagccaactggacaatagtctccacacccccccactatcaccgtgagttgtccgcacgcaccgcacgtctcgcagccaaaaaaaaaaagaaagaaaaaaaagaaaaagaaaaaacagcaggtgggtccgggtcgtgggggccggaaacgcgaggaggatcgcgagccagcgacgaggagcttaggcctcatcgttgaagatgcctctgccgacagtggtcccaaagatggacccccacccacgaggagcatcgtggaaaaagaagacgttccaaccacgtcttcaaagcaagtggattgatgtgatatctccactgacgtaagggatgacgcacaatcccactatccttcgaggcctcatcgttgaagatgcctctgccgacagtggtcccaaagatggacccccacccacgaggagcatcgtggaaaaagaagacgttccaaccacgtcttcaaagcaagtggattgatgtgatatctccactgacgtaagggatgacgcacaatcccactatccttcgaagctccctccctccgcttccaaagaaacgccccccatcgccactatatacatacccccccctctcctcccatccccccaacccttctagaaccatcttccacacactcaagccacactattggagaacacacagggacaacacaccataagatccaagggaggcctccgccgccgccggtaaccaccccgcccctctcctctttctttctccgtttttttttccgtctcggtctcgatctttggccttggtagtttgggtgggcgagaggcggcttcgtgcgcgcccagatcggtgcgcgggaggggcgggatctcgcggctggggctctcgccggcgtggatccggcccggatctcgcggggaatggggctctcggatgtagatctgcgatccgccgttgttgggggagatgatggggggtttaaaatttccgccgtgctaaacaagatcaggaagaggggaaaagggcactatggtttatatttttatatatttctgctgcttcgtcaggcttagatgtgctagatctttctttcttctttttgtgggtagaatttgaatccctcagcattgttcatcggtagtttttcttttcatgatttgtgacaaatgcagcctcgtgcggagcttttttgtaggtagaaggcggccgcatggcccagtctaagcacgggttgacgaaggagatgactatgaagtatcgcatggaaggctgcgttgacggccacaaattcgtcattaccggcgagggcatcggctacccctttaaggtaagtttctgcttctacctttgatatatatataataattatcattaattagtagtaatataatatttcaaatatttttttcaaaataaaagaatgtagtatatagcaattgcttttctgtagtttataagtgtgtatattttaatttataacttttctaatatatgaccaaaatttgttgatgtgcagggcaagcaagcgataaacctgtgcgtggtggagggtggccctctgcccttcgccgaggatatactctcagccgccttcatgtacgggaatcgggtgttcacggagtacccgcaagacatcgtggactacttcaagaactcctgccccgccggatacacatgggaccgttccttcctcttcgaggacggagccgtttgcatctgcaacgcggacatcaccgtgtccgtcgaggagaactgcatgtaccacgagtcaaagttctatggagtgaacttcccggccgatggtcccgtgatgaagaaaatgacggacaactgggagccgtcgtgcgagaaaatcattcccgtcccaaaacagggaatcctcaagggcgacgtgtcgatgtacctacttctcaaggacggtggacggctacggtgccagttcgacactgtttacaaggcgaagtcggtgccgaggaagatgccggactggcactttatccagcacaagctgacaagggaggacagaagcgacgctaagaaccagaaatggcacctcaccgagcacgccatcgccagtggctctgcgctgcccgggtgaccctgcaatgtgaccctagacttgtccatcttctggattggccaacttaattaatgtatgaaataaaaggatgcacacatagtgacatgctaatcactataatgtgggcatcaaagttgtgtgttatgtgtaattactaattatctgaataagagaaagagatcatccatatttcttatcctaaatgaatgtcacgtgtctttataattctttgatgaaccagatgcattttattaaccaattccatatacatataaatattaatcatatataattaatatcaattgggttagcaaaacaaatctagtctaggtgtgttttgctaattattgggggatagtgcaaaaagaaatctacgttctcaataattcagatagaaaacttaataaagtgagataatttacatagattgcttttatcctttgatatatgtgaaaccatgcatgatataaggaaaatagatagagaaataattttttacatcgttgaatatgtaaacaatttaattcaagaagctaggaatataaatattgaggagtttatgattattattattattttgatgttcaatgaagttttttttaatttcatatgaagtatacaaaaattcttcatagatttttgtttctatgccgtagttatctttaatatatttgtggttgaagaaatttattgctagaaacgaatggattgtcaatttttttttaaagcaaatatatatgaaattatactgtatattattttagtcatgattaaaatgtggccttaattgaatcatctttctcattcattttttcaaaagcatatcaggatgattgatatttatctattttaaaaattaatttaagggttcaaattaaatttaacttaaaagtgtcctaaccgtagttaaaggtttactttaaaaaaatactatgaaaaatctaatcttctatgaatcgagggcccttagctagttag

SEQ ID NO: 85 - DNA, 12883 bp, synthetic construct
  misc_feature 1..12883: note = pWISE3387 Full plasmid sequence
  source 1..12883: mol_type = other DNA
agcttactagtcaacaattggccaatctttgttctaaattgctaataaacgaccatttccgtcaattctccttggttgcaacagtctacccgtcaaatgtttactaatttataagtgtgaagtttgaattatgaaagacgaaatcgtattaaaaattcacaagaataaacaactccatagattttcaaaaaaacagtcacgagaaaaaaaccacagtccgtttgtctgctcttctagtttttattatttttctattaatagttttttgttatttcgagaataaaatttgaacgatgtccgaaccacaaaagccgagccgataaatcctaagccgagcctaactttagccgtaaccatcagtcacggctcccgggctaattcatttgaaccgaatcataatcaacggtttagatcaaactcaaaacaatctaacggcaacatagacgcgtcggtgagctaaaaagagtgtgaaagccaggtcaccatagcattgtctctcccagattttttatttgggaaataatagaagaaatagaaaaaaataaaagagtgagaaaaatcgtagagctatatattcgcacatgtactcgtttcgctttccttagtgttagctgctgccgctgttgtttctcctccatttctctatctttctctctcgctgcttctcgaatcttctgtatcatcttcttcttcttcaaggtgagtctctagatccgttcgcttgattttgctgctcgttagtcgttattgttgattctctatgccgatttcgctagatctgtttagcatgcgttgtggttttatgagaaaatctttgttttgggggttgcttgttatgtgattcgatccgtgcttgttggatcgatctgagctaattcttaaggtttatgtgttagatctatggagtttgaggattcttctcgcttctgtcgatctctcgctgttatttttgtttttttcagtgaagtgaagttgtttagttcgaaatgacttcgtgtatgctcgattgatctggttttaatcttcgatctgttaggtgttgatgtttacaagtgaattctagtgttttctcgttgagatctgtgaagtttgaacctagttttctcaataatcaacatatgaagcgatgtttgagtttcaataaacgctgctaatcttcgaaactaagttgtgatctgattcgtgtttacttcatgagcttatccaattcatttcggtttcattttactttttttttagtgaaccatggcgcaagttagcagaatctgcaatggtgtgcagaacccatctcttatctccaatctctcgaaatccagtcaacgcaaatctcccttatcggtttctctgaagacgcagcagcatccacgagcttatccgatttcgtcgtcgtggggattgaagaagagtgggatgacgttaattggctctgagcttcgtcctcttaaggtcatgtcttctgtttccacggcgtgcatgggggaagcggtgatcgccgaagtatcgactcaactatcagaggtagttggcgtcatcgagcgccatctcgaaccgacgttgctggccgtacatttgtacggctccgcagtggatggcggcctgaagccacacagtgatattgatttgctggttacggtgaccgtaaggcttgatgaaacaacgcggcgagctttgatcaacgaccttttggaaacttcggcttcccctggagagagcgagattctccgcgctgtagaagtcaccattgttgtgcacgacgacatcattccgtggcgttatccagctaagcgcgaactgcaatttggagaatggcagcgcaatgacattcttgcaggtatcttcgagccagccacgatcgacattgatctggctatcttgctgacaaaagcaagagaacatagcgttgccttggtaggtccagcggcggaggaactctttgatccggttcctgaacaggatctatttgaggcgctaaatgaaaccttaacgctatggaactcgccgcccgactgggctggcgatgagcgaaatgtagtgcttacgttgtcccgcatttggtacagcgcagtaaccggcaaaatcgcgccgaaggatgtcgctgccgactgggcaatggagcgcctgccggcccagtatcagcccgtcatacttgaagctagacaggcttatcttggacaagaagaagatcgcttggcctcgcgcgcagatcagttggaagaatttgtccactacgtgaaaggcgagatcaccaaggtagtcggcaaataaggatcaattcccgatcgttcaaacatttggcaataaagtttcttaagattgaatcctgttgccggtcttgcgatgattatcatataatttctgttgaattacgttaagcatgtaataattaacatgtaatgcatgacgttatttatgagatgggtttttatgattagagtcccgcaattatacatttaatacgcgatagaaaacaaaatatagcgcgcaaactaggataaattatcgcgcgcggtgtcatctatgttactagatcggtacctacgcgtagctagcccgtgaagtttctcatctaagcccccatttggacgtgaatgtagacacgtcgaaataaagatttccgaattagaataatttgtttattgctttcgcctataaatacgacggatcgtaatttgtcgttttatcaaaatgtactttcattttataataacgctgcggacatctacatttttgaattgaaaaaaaattggtaattactctttctttttctccatattgaccatcatactcattgctgatccatgtagatttcccggacatgaagccatttacaattgaatatatcctgccgccgctgccgctttgcacccggtggagcttgcatgttggtttctacgcagaactgagccggttaggcagataatttccattgagaactgagccatgtgcaccttccccccaacacggtgagcgacggggcaacggagtgatccacatgggacttttcctagcttggctgccatttttggggtgaggccgttcgcggccgaggggcgcagcccctggggggatgggaggcccgcgttagcgggccgggagggttcgagaagggggggcaccccccttcggcgtgcgcggtcacgcgcacagggcgcagccctggttaaaaacaaggtttataaatattggtttaaaagcaggttaaaagacaggttagcggtggccgaaaaacgggcggaaacccttgcaaatgctggattttctgcctgtggacagcccctcaaatgtcaataggtgcgcccctcatctgtcagcactctgcccctcaagtgtcaaggatcgcgcccctcatctgtcagtagtcgcgcccctcaagtgtcaataccgcagggcacttatccccaggcttgtccacatcatctgtgggaaactcgcgtaaaatcaggcgttttcgccgatttgcgaggctggccagctccacgtcgccggccgaaatcgagcctgcccctcatctgtcaacgccgcgccgggtgagtcggcccctcaagtgtcaacgtccgcccctcatctgtcagtgagggccaagttttccgcgaggtatccacaacgccggcggccggccgcggtgtctcgcacacggcttcgacggcgtttctggcgcgtttgcagggccatagacggccgccagcccagcggcgagggcaaccagcccggtgagcgtcggaaagggtcgatcgaccgatgcccttgagagccttcaacccagtcagctccttccggtgggcgcggggcatgactatcgtcgccgcacttatgactgtcttctttatcatgcaactcgtaggacaggtgccggcagcgctctgggtcattttcggcgaggaccgctttcgctggagcgcgacgatgatcggcctgtcgcttgcggtattcggaatcttgcacgccctcgctcaagccttcgtcactggtcccgccaccaaacgtttcggcgagaagcaggccattatcgccggcatggcggccgacgcgctgggctacgtcttgctggcgttcgcgacgcgaggctggatggccttccccattatgattcttctcgcttccggcggcatcgggatgcccgcgttgcaggccatgctgtccaggcaggtagatgacgaccatcagggacagcttcaaggatcgctcgcggctcttaccagcctaacttcgatcattggaccgctgatcgtcacggcgatttatgccgcctcggcgagcacatggaacgggttggcatggattgtaggcgccgccctataccttgtctgcctccccgcgttgcgtcgcggtgcatggagccgggccacctcgacctgaatggaagccggcggcacctcgctaacggattcaccactccaagaattggagccaatcaattcttgcggagaactgtgaatgcgcaaaccaacccttggcagaacatatccatcgcgtccgccatctccagcagccgcacgcggcgcatctcgggcagcgttgggtcctggccacgggtgcgcatgatcgtgctcctgtcgttgaggacccggctaggctggcggggttgccttactggttagcagaatgaatcaccgatacgcgagcgaacgtgaagcgactgctgctgcaaaacgtctgcgacctgagcaacaacatgaatggtcttcggtttccgtgtttcgtaaagtctggaaacgcggaagtcagcgccctgcaccattatgttccggatctgcatcgcaggatgctgctggctaccctgtggaacacctacatctgtattaacgaagcgctggcattgaccctgagtgatttttctctggtcccgccgcatccataccgccagttgtttaccctcacaacgttccagtaaccgggcatgttcatcatcagtaacccgtatcgtgagcatcctctctcgtttcatcggtatcattacccccatgaacagaaatcccccttacacggaggcatcagtgaccaaacaggaaaaaaccgcccttaacatggcccgctttatcagaagccagacattaacgcttctggagaaactcaacgagctggacgcggatgaacaggcagacatctgtgaatcgcttcacgaccacgctgatgagctttaccgcagctgcctcgcgcgtttcggtgatgacggtgaaaacctctgacacatgcagctcccggagacggtcacagcttgtctgtaagcggatgccgggagcagacaagcccgtcagggcgcgtcagcgggtgttggcgggtgtcggggcgcagccatgacccagtcacgtagcgatagcggagtgtatactggcttaactatgcggcatcagagcagattgtactgagagtgcaccatatgcggtgtgaaataccgcacagatgcgtaaggagaaaataccgcatcaggcgctcttccgcttcctcgctcactgactcgctgcgctcggtcgttcggctgcggcgagcggtatcagctcactcaaaggcggtaatacggttatccacagaatcaggggataacgcaggaaagaacatgtgagcaaaaggccagcaaaaggccaggaaccgtaaaaaggccgcgttgctggcgtttttccataggctccgcccccctgacgagcatcacaaaaatcgacgctcaagtcagaggtggcgaaacccgacaggactataaagataccaggcgtttccccctggaagctccctcgtgcgctctcctgttccgaccctgccgcttaccggatacctgtccgcctttctcccttcgggaagcgtggcgctttctcatagctcacgctgtaggtatctcagttcggtgtaggtcgttcgctccaagctgggctgtgtgcacgaaccccccgttcagcccgaccgctgcgccttatccggtaactatcgtcttgagtccaacccggtaagacacgacttatcgccactggcagcagccactggtaacaggattagcagagcgaggtatgtaggcggtgctacagagttcttgaagtggtggcctaactacggctacactagaaggacagtatttggtatctgcgctctgctgaagccagttaccttcggaaaaagagttggtagctcttgatccggcaaacaaaccaccgctggtagcggtggtttttttgtttgcaagcagcagattacgcgcagaaaaaaaggatctcaagaagatcctttgatcttttctacggggtctgacgctcagtggaacgaaaactcacgttaagggattttggtcatgagattatcaaaaaggatcttcacctagatccttttaaattaaaaatgaagttttaaatcaatctaaagtatatatgagtaaacttggtctgacagttaccaatgcttaatcagtgaggcacctatctcagcgatctgtctatttcgttcatccatagttgcctgactccccgtcgtgtagataactacgatacgggagggcttaccatctggccccagtgctgcaatgataccgcgagacccacgctcaccggctccagatttatcagcaataaaccagccagccggaagggccgagcgcagaagtggtcctgcaactttatccgcctccatccagtctattaattgttgccgggaagctagagtaagtagttcgccagttaatagtttgcgcaacgttgttgccattgctgcaggtcgggagcacaggatgacgcctaacaattcattcaagccgacaccgcttcgcggcgcggcttaattcaggagttaaacatcatgagggaagcggtgatcgccgaagtatcgactcaactatcagaggtagttggcgtcatcgagcgccatctcgaaccgacgttgctggccgtacatttgtacggctccgcagtggatggcggcctgaagccacacagtgatattgatttgctggttacggtgaccgtaaggcttgatgaaacaacgcggcgagctttgatcaacgaccttttggaaacttcggcttcccctggagagagcgagattctccgcgctgtagaagtcaccattgttgtgcacgacgacatcattccgtggcgttatccagctaagcgcgaactgcaatttggagaatggcagcgcaatgacattcttgcaggtatcttcgagccagccacgatcgacattgatctggctatcttgctgacaaaagcaagagaacatagcgttgccttggtaggtccagcggcggaggaactctttgatccggttcctgaacaggatctatttgaggcgctaaatgaaaccttaacgctatggaactcgccgcccgactgggctggcgatgagcgaaatgtagtgcttacgttgtcccgcatttggtacagcgcagtaaccggcaaaatcgcgccgaaggatgtcgctgccgactgggcaatggagcgcctgccggcccagtatcagcccgtcatacttgaagctaggcaggcttatcttggacaagaagatcgcttggcctcgcgcgcagatcagttggaagaatttgttcactacgtgaaaggcgagatcaccaaggtagtcggcaaataatgtctaacaattcgttcaagccgacgccgcttcgcggcgcggcttaactcaagcgttagatgctgcaggcatcgtggtgtcacgctcgtcgtttggtatggcttcattcagctccggttcccaacgatcaaggcgagttacatgatcccccatgttgtgcaaaaaagcggttagctccttcggtcctccgatcgaggatttttcggcgctgcgctacgtccgcgaccgcgttgagggatcaagccacagcagcccactcgaccttctagccgacccagacgagccaagggatctttttggaatgctgctccgtcgtcaggctttccgacgtttgggtggttgaacagaagtcattatcgcacggaatgccaagcactcccgaggggaaccctgtggttggcatgcacatacaaatggacgaacggataaaccttttcacgcccttttaaatatccgattattctaataaacgctcttttctcttaggtttacccgccaatatatcctgtcaaacactgatagtttaaactgaaggcgggaaacgacaatctaaaagattgacacattgcctatactacattctagcgtaggttaaatttatatcagataatgtgggagaaagagatcagttaccattgcatgacaatagctgaccccagatatgagttgttgaaagaagaaacgagcctgtggcatgacaatgggttaatagttacacaggaaatagagagctagcacaagcaaaagtaaacaaattgtataagaacctcatcctcattaaaacgccctgcattgcagattttctcaaatagttctccaccagatgcatattccattacaatgtctagatgagtcggtgttagaataacctgagtcaaatatcaaagaacattttccatgaatatgattattgtacctctgaacataaaaatatataaatacaaatatataccaacctccttaaacctgataatgttaggatgtcttagagacctgtgattaatgatttctcttttaacattttcatcaatctgtgacacacagcaaatgatagggggcgcgcctagctaactagctagccacgtgactcgcagaacgttgtgtggcgagacggaaagaaagtcacgcctccaaagagtgcagcatctcttctggctctcacggtcctctgtggatccatcgatatcgaattcctgcaggctcgaggtcattcatatgcttgagaagagagtcgggatagtccaaaataaaacaaaggtaagattacctggtcaaaagtgaaaacatcagttaaaaggtggtataaagtaaaatatcggtaataaaaggtggcccaaagtgaaatttactcttttctactattataaaaattgaggatgtttttgtcggtactttgatacgtcatttttgtatgaattggtttttaagtttattcgcttttggaaatgcatatctgtatttgagtcgggttttaagttcgtttgcttttgtaaatacagagggatttgtataagaaatatctttagaaaaacccatatgctaatttgacataatttttgagaaaaatatatattcaggcgaattctcacaatgaacaataataagattaaaatagctttcccccgttgcagcgcatgggtattttttctagtaaaaataaaagataaacttagactcaaaacatttacaaaaacaacccctaaagttcctaaagcccaaagtgctatccacgatccatagcaagcccagcccaacccaacccaacccaacccaccccagtccagccaactggacaatagtctccacacccccccactatcaccgtgagttgtccgcacgcaccgcacgtctcgcagccaaaaaaaaaaagaaagaaaaaaaagaaaaagaaaaaacagcaggtgggtccgggtcgtgggggccggaaacgcgaggaggatcgcgagccagcgacgaggagcttaggcctcatcgttgaagatgcctctgccgacagtggtcccaaagatggacccccacccacgaggagcatcgtggaaaaagaagacgttccaaccacgtcttcaaagcaagtggattgatgtgatatctccactgacgtaagggatgacgcacaatcccactatccttcgaggcctcatcgttgaagatgcctctgccgacagtggtcccaaagatggacccccacccacgaggagcatcgtggaaaaagaagacgttccaaccacgtcttcaaagcaagtggattgatgtgatatctccactgacgtaagggatgacgcacaatcccactatccttcgaagctccctccctccgcttccaaagaaacgccccccatcgccactatatacatacccccccctctcctcccatccccccaacccttctagaaccatcttccacacactcaagccacactattggagaacacacagggacaacacaccataagatccaagggaggcctccgccgccgccggtaaccaccccgcccctctcctctttctttctccgtttttttttccgtctcggtctcgatctttggccttggtagtttgggtgggcgagaggcggcttcgtgcgcgcccagatcggtgcgcgggaggggcgggatctcgcggctggggctctcgccggcgtggatccggcccggatctcgcggggaatggggctctcggatgtagatctgcgatccgccgttgttgggggagatgatggggggtttaaaatttccgccgtgctaaacaagatcaggaagaggggaaaagggcactatggtttatatttttatatatttctgctgcttcgtcaggcttagatgtgctagatctttctttcttctttttgtgggtagaatttgaatccctcagcattgttcatcggtagtttttcttttcatgatttgtgacaaatgcagcctcgtgcggagcttttttgtaggtagaaggcggccgcatggcccagtctaagcacgggttgacgaaggagatgactatgaagtatcgcatggaaggctgcgttgacggccacaaattcgtcattaccggcgagggcatcggctacccctttaaggtaagtttctgcttctacctttgatatatatataataattatcattaattagtagtaatataatatttcaaatatttttttcaaaataaaagaatgtagtatatagcaattgcttttctgtagtttataagtgtgtatattttaatttataacttttctaatatatgaccaaaatttgttgatgtgcagggcaagcaagcgataaacctgtgcgtggtggagggtggccctctgcccttcgccgaggatatactctcagccgccttcatgtacgggaatcgggtgttcacggagtacccgcaagacatcgtggactacttcaagaactcctgccccgccggatacacatgggaccgttccttcctcttcgaggacggagccgtttgcatctgcaacgcggacatcaccgtgtccgtcgaggagaactgcatgtaccacgagtcaaagttctatggagtgaacttcccggccgatggtcccgtgatgaagaaaatgacggacaactgggagccgtcgtgcgagaaaatcattcccgtcccaaaacagggaatcctcaagggcgacgtgtcgatgtacctacttctcaaggacggtggacggctacggtgccagttcgacactgtttacaaggcgaagtcggtgccgaggaagatgccggactggcactttatccagcacaagctgacaagggaggacagaagcgacgctaagaaccagaaatggcacctcaccgagcacgccatcgccagtggctctgcgctgcccgggtgaccctgcaatgtgaccctagacttgtccatcttctggattggccaacttaattaatgtatgaaataaaaggatgcacacatagtgacatgctaatcactataatgtgggcatcaaagttgtgtgttatgtgtaattactaattatctgaataagagaaagagatcatccatatttcttatcctaaatgaatgtcacgtgtctttataattctttgatgaaccagatgcattttattaaccaattccatatacatataaatattaatcatatataattaatatcaattgggttagcaaaacaaatctagtctaggtgtgttttgctaattattgggggatagtgcaaaaagaaatctacgttctcaataattcagatagaaaacttaataaagtgagataatttacatagattgcttttatcctttgatatatgtgaaaccatgcatgatataaggaaaatagatagagaaataattttttacatcgttgaatatgtaaacaatttaattcaagaagctaggaatataaatattgaggagtttatgattattattattattttgatgttcaatgaagttttttttaatttcatatgaagtatacaaaaattcttcatagatttttgtttctatgccgtagttatctttaatatatttgtggttgaagaaatttattgctagaaacgaatggattgtcaatttttttttaaagcaaatatatatgaaattatactgtatattattttagtcatgattaaaatgtggccttaattgaatcatctttctcattcattttttcaaaagcatatcaggatgattgatatttatctattttaaaaattaatttaagggttcaaattaaatttaacttaaaagtgtcctaaccgtagttaaaggtttactttaaaaaaatactatgaaaaatctaatcttctatgaatcgagggcccttagctagttagacgataaaaatgttttaaacgatatatattataaaaaaaaacgtttcaaaaataaatacaaaaatgtttttaaatatatataatttaactcattaaagaaaataaaaatgcaagtgcggtgacaagacaagctaaaagttgcaaaagaaatggcagggctataaggctcacctactcctggatttaccaaattttggttcgtccctatactcgaaaaataaaacaaaataaatttcagtatcttcgtttttgtatgctttgactgtgaggcgaggccaactttcttcttctgtctgagatgaattttgtttgcctcctgtgaaggatgtatcattcaaagtgaatgttttgcaactgccagtagtcccacatcgaccaaatattcttattacagtgtgtttatatagcacctggagaaggaatgggttgtttcaaagattaaataatttctactaagtgtagatacacctactcatctggccattgttaatttctactaagtgtagatttttttta

SEQ ID NO: 86 - DNA, 12883 bp, synthetic construct
  misc_feature 1..12883: note = pWISE3388 Full plasmid sequence
  source 1..12883: mol_type = other DNA
agcttactagtcaacaattggccaatctttgttctaaattgctaataaacgaccatttccgtcaattctccttggttgcaacagtctacccgtcaaatgtttactaatttataagtgtgaagtttgaattatgaaagacgaaatcgtattaaaaattcacaagaataaacaactccatagattttcaaaaaaacagtcacgagaaaaaaaccacagtccgtttgtctgctcttctagtttttattatttttctattaatagttttttgttatttcgagaataaaatttgaacgatgtccgaaccacaaaagccgagccgataaatcctaagccgagcctaactttagccgtaaccatcagtcacggctcccgggctaattcatttgaaccgaatcataatcaacggtttagatcaaactcaaaacaatctaacggcaacatagacgcgtcggtgagctaaaaagagtgtgaaagccaggtcaccatagcattgtctctcccagattttttatttgggaaataatagaagaaatagaaaaaaataaaagagtgagaaaaatcgtagagctatatattcgcacatgtactcgtttcgctttccttagtgttagctgctgccgctgttgtttctcctccatttctctatctttctctctcgctgcttctcgaatcttctgtatcatcttcttcttcttcaaggtgagtctctagatccgttcgcttgattttgctgctcgttagtcgttattgttgattctctatgccgatttcgctagatctgtttagcatgcgttgtggttttatgagaaaatctttgttttgggggttgcttgttatgtgattcgatccgtgcttgttggatcgatctgagctaattcttaaggtttatgtgttagatctatggagtttgaggattcttctcgcttctgtcgatctctcgctgttatttttgtttttttcagtgaagtgaagttgtttagttcgaaatgacttcgtgtatgctcgattgatctggttttaatcttcgatctgttaggtgttgatgtttacaagtgaattctagtgttttctcgttgagatctgtgaagtttgaacctagttttctcaataatcaacatatgaagcgatgtttgagtttcaataaacgctgctaatcttcgaaactaagttgtgatctgattcgtgtttacttcatgagcttatccaattcatttcggtttcattttactttttttttagtgaaccatggcgcaagttagcagaatctgcaatggtgtgcagaacccatctcttatctccaatctctcgaaatccagtcaacgcaaatctcccttatcggtttctctgaagacgcagcagcatccacgagcttatccgatttcgtcgtcgtggggattgaagaagagtgggatgacgttaattggctctgagcttcgtcctcttaaggtcatgtcttctgtttccacggcgtgcatgggggaagcggtgatcgccgaagtatcgactcaactatcagaggtagttggcgtcatcgagcgccatctcgaaccgacgttgctggccgtacatttgtacggctccgcagtggatggcggcctgaagccacacagtgatattgatttgctggttacggtgaccgtaaggcttgatgaaacaacgcggcgagctttgatcaacgaccttttggaaacttcggcttcccctggagagagcgagattctccgcgctgtagaagtcaccattgttgtgcacgacgacatcattccgtggcgttatccagctaagcgcgaactgcaatttggagaatggcagcgcaatgacattcttgcaggtatcttcgagccagccacgatcgacattgatctggctatcttgctgacaaaagcaagagaacatagcgttgccttggtaggtccagcggcggaggaactctttgatccggttcctgaacaggatctatttgaggcgctaaatgaaaccttaacgctatggaactcgccgcccgactgggctggcgatgagcgaaatgtagtgcttacgttgtcccgcatttggtacagcgcagtaaccggcaaaatcgcgccgaaggatgtcgctgccgactgggcaatggagcgcctgccggcccagtatcagcccgtcatacttgaagctagacaggcttatcttggacaagaagaagatcgcttggcctcgcgcgcagatcagttggaagaatttgtccactacgtgaaaggcgagatcaccaaggtagtcggcaaataaggatcaattcccgatcgttcaaacatttggcaataaagtttcttaagattgaatcctgttgccggtcttgcgatgattatcatataatttctgttgaattacgttaagcatgtaataattaacatgtaatgcatgacgttatttatgagatgggtttttatgattagagtcccgcaattatacatttaatacgcgatagaaaacaaaatatagcgcgcaaactaggataaattatcgcgcgcggtgtcatctatgttactagatcggtacctacgcgtagctagcccgtgaagtttctcatctaagcccccatttggacgtgaatgtagacacgtcgaaataaagatttccgaattagaataatttgtttattgctttcgcctataaatacgacggatcgtaatttgtcgttttatcaaaatgtactttcattttataataacgctgcggacatctacatttttgaattgaaaaaaaattggtaattactctttctttttctccatattgaccatcatactcattgctgatccatgtagatttcccggacatgaagccatttacaattgaatatatcctgccgccgctgccgctttgcacccggtggagcttgcatgttggtttctacgcagaactgagccggttaggcagataatttccattgagaactgagccatgtgcaccttccccccaacacggtgagcgacggggcaacggagtgatccacatgggacttttcctagcttggctgccatttttggggtgaggccgttcgcggccgaggggcgcagcccctggggggatgggaggcccgcgttagcgggccgggagggttcgagaagggggggcaccccccttcggcgtgcgcggtcacgcgcacagggcgcagccctggttaaaaacaaggtttataaatattggtttaaaagcaggttaaaagacaggttagcggtggccgaaaaacgggcggaaacccttgcaaatgctggattttctgcctgtggacagcccctcaaatgtcaataggtgcgcccctcatctgtcagcactctgcccctcaagtgtcaaggatcgcgcccctcatctgtcagtagtcgcgcccctcaagtgtcaataccgcagggcacttatccccaggcttgtccacatcatctgtgggaaactcgcgtaaaatcaggcgttttcgccgatttgcgaggctggccagctccacgtcgccggccgaaatcgagcctgcccctcatctgtcaacgccgcgccgggtgagtcggcccctcaagtgtcaacgtccgcccctcatctgtcagtgagggccaagttttccgcgaggtatccacaacgccggcggccggccgcggtgtctcgcacacggcttcgacggcgtttctggcgcgtttgcagggccatagacggccgccagcccagcggcgagggcaaccagcccggtgagcgtcggaaagggtcgatcgaccgatgcccttgagagccttcaacccagtcagctccttccggtgggcgcggggcatgactatcgtcgccgcacttatgactgtcttctttatcatgcaactcgtaggacaggtgccggcagcgctctgggtcattttcggcgaggaccgctttcgctggagcgcgacgatgatcggcctgtcgcttgcggtattcggaatcttgcacgccctcgctcaagccttcgtcactggtcccgccaccaaacgtttcggcgagaagcaggccattatcgccggcatggcggccgacgcgctgggctacgtcttgctggcgttcgcgacgcgaggctggatggccttccccattatgattcttctcgcttccggcggcatcgggatgcccgcgttgcaggccatgctgtccaggcaggtagatgacgaccatcagggacagcttcaaggatcgctcgcggctcttaccagcctaacttcgatcattggaccgctgatcgtcacggcgatttatgccgcctcggcgagcacatggaacgggttggcatggattgtaggcgccgccctataccttgtctgcctccccgcgttgcgtcgcggtgcatggagccgggccacctcgacctgaatggaagccggcggcacctcgctaacggattcaccactccaagaattggagccaatcaattcttgcggagaactgtgaatgcgcaaaccaacccttggcagaacatatccatcgcgtccgccatctccagcagccgcacgcggcgcatctcgggcagcgttgggtcctggccacgggtgcgcatgatcgtgctcctgtcgttgaggacccggctaggctggcggggttgccttactggttagcagaatgaatcaccgatacgcgagcgaacgtgaagcgactgctgctgcaaaacgtctgcgacctgagcaacaacatgaatggtcttcggtttccgtgtttcgtaaagtctggaaacgcggaagtcagcgccctgcaccattatgttccggatctgcatcgcaggatgctgctggctaccctgtggaacacctacatctgtattaacgaagcgctggcattgaccctgagtgatttttctctggtcccgccgcatccataccgccagttgtttaccctcacaacgttccagtaaccgggcatgttcatcatcagtaacccgtatcgtgagcatcctctctcgtttcatcggtatcattacccccatgaacagaaatcccccttacacggaggcatcagtgaccaaacaggaaaaaaccgcccttaacatggcccgctttatcagaagccagacattaacgcttctggagaaactcaacgagctggacgcggatgaacaggcagacatctgtgaatcgcttcacgaccacgctgatgagctttaccgcagctgcctcgcgcgtttcggtgatgacggtgaaaacctctgacacatgcagctcccggagacggtcacagcttgtctgtaagcggatgccgggagcagacaagcccgtcagggcgcgtcagcgggtgttggcgggtgtcggggcgcagccatgacccagtcacgtagcgatagcggagtgtatactggcttaactatgcggcatcagagcagattgtactgagagtgcaccatatgcggtgtgaaataccgcacagatgcgtaaggagaaaataccgcatcaggcgctcttccgcttcctcgctcactgactcgctgcgctcggtcgttcggctgcggcgagcggtatcagctcactcaaaggcggtaatacggttatccacagaatcaggggataacgcaggaaagaacatgtgagcaaaaggccagcaaaaggccaggaaccgtaaaaaggccgcgttgctggcgtttttccataggctccgcccccctgacgagcatcacaaaaatcgacgctcaagtcagaggtggcgaaacccgacaggactataaagataccaggcgtttccccctggaagctccctcgtgcgctctcctgttccgaccctgccgcttaccggatacctgtccgcctttctcccttcgggaagcgtggcgctttctcatagctcacgctgtaggtatctcagttcggtgtaggtcgttcgctccaagctgggctgtgtgcacgaaccccccgttcagcccgaccgctgcgccttatccggtaactatcgtcttgagtccaacccggtaagacacgacttatcgccactggcagcagccactggtaacaggattagcagagcgaggtatgtaggcggtgctacagagttcttgaagtggtggcctaactacggctacactagaaggacagtatttggtatctgcgctctgctgaagccagttaccttcggaaaaagagttggtagctcttgatccggcaaacaaaccaccgctggtagcggtggtttttttgtttgcaagcagcagattacgcgcagaaaaaaaggatctcaagaagatcctttgatcttttctacggggtctgacgctcagtggaacgaaaactcacgttaagggattttggtcatgagattatcaaaaaggatcttcacctagatccttttaaattaaaaatgaagttttaaatcaatctaaagtatatatgagtaaacttggtctgacagttaccaatgcttaatcagtgaggcacctatctcagcgatctgtctatttcgttcatccatagttgcctgactccccgtcgtgtagataactacgatacgggagggcttaccatctggccccagtgctgcaatgataccgcgagacccacgctcaccggctccagatttatcagcaataaaccagccagccggaagggccgagcgcagaagtggtcctgcaactttatccgcctccatccagtctattaattgttgccgggaagctagagtaagtagttcgccagttaatagtttgcgcaacgttgttgccattgctgcaggtcgggagcacaggatgacgcctaacaattcattcaagccgacaccgcttcgcggcgcggcttaattcaggagttaaacatcatgagggaagcggtgatcgccgaagtatcgactcaactatcagaggtagttggcgtcatcgagcgccatctcgaaccgacgttgctggccgtacatttgtacggctccgcagtggatggcggcctgaagccacacagtgatattgatttgctggttacggtgaccgtaaggcttgatgaaacaacgcggcgagctttgatcaacgaccttttggaaacttcggcttcccctggagagagcgagattctccgcgctgtagaagtcaccattgttgtgcacgacgacatcattccgtggcgttatccagctaagcgcgaactgcaatttggagaatggcagcgcaatgacattcttgcaggtatcttcgagccagccacgatcgacattgatctggctatcttgctgacaaaagcaagagaacatagcgttgccttggtaggtccagcggcggaggaactctttgatccggttcctgaacaggatctatttgaggcgctaaatgaaaccttaacgctatggaactcgccgcccgactgggctggcgatgagcgaaatgtagtgcttacgttgtcccgcatttggtacagcgcagtaaccggcaaaatcgcgccgaaggatgtcgctgccgactgggcaatggagcgcctgccggcccagtatcagcccgtcatacttgaagctaggcaggcttatcttggacaagaagatcgcttggcctcgcgcgcagatcagttggaagaatttgttcactacgtgaaaggcgagatcaccaaggtagtcggcaaataatgtctaacaattcgttcaagccgacgccgcttcgcggcgcggcttaactcaagcgttagatgctgcaggcatcgtggtgtcacgctcgtcgtttggtatggcttcattcagctccggttcccaacgatcaaggcgagttacatgatcccccatgttgtgcaaaaaagcggttagctccttcggtcctccgatcgaggatttttcggcgctgcgctacgtccgcgaccgcgttgagggatcaagccacagcagcccactcgaccttctagccgacccagacgagccaagggatctttttggaatgctgctccgtcgtcaggctttccgacgtttgggtggttgaacagaagtcattatcgcacggaatgccaagcactcccgaggggaaccctgtggttggcatgcacatacaaatggacgaacggataaaccttttcacgcccttttaaatatccgattattctaataaacgctcttttctcttaggtttacccgccaatatatcctgtcaaacactgatagtttaaactgaaggcgggaaacgacaatctccctatcatttgctgtgtgtcacagattgatgaaaatgttaaaagagaaatcattaatcacaggtctctaagacatcctaacattatcaggtttaaggaggttggtatatatttgtatttatatatttttatgttcagaggtacaataatcatattcatggaaaatgttctttgatatttgactcaggttattctaacaccgactcatctagacattgtaatggaatatgcatctggtggagaactatttgagaaaatctgcaatgcagggcgttttaatgaggatgaggttcttatacaatttgtttacttttgcttgtgctagctctctatttcctgtgtaactattaacccattgtcatgccacaggctcgtttcttctttcaacaactcatatctggggtcagctattgtcatgcaatggtaactgatctctttctcccacattatctgatataaatttaacctacgctagaatgtagtataggcaatgtgtcaatcttttggcgcgcctagctaactagctagccacgtgactcgcagaacgttgtgtggcgagacggaaagaaagtcacgcctccaaagagtgcagcatctcttctggctctcacggtcctctgtggatccatcgatatcgaattcctgcaggctcgaggtcattcatatgcttgagaagagagtcgggatagtccaaaataaaacaaaggtaagattacctggtcaaaagtgaaaacatcagttaaaaggtggtataaagtaaaatatcggtaataaaaggtggcccaaagtgaaatttactcttttctactattataaaaattgaggatgtttttgtcggtactttgatacgtcatttttgtatgaattggtttttaagtttattcgcttttggaaatgcatatctgtatttgagtcgggttttaagttcgtttgcttttgtaaatacagagggatttgtataagaaatatctttagaaaaacccatatgctaatttgacataatttttgagaaaaatatatattcaggcgaattctcacaatgaacaataataagattaaaatagctttcccccgttgcagcgcatgggtattttttctagtaaaaataaaagataaacttagactcaaaacatttacaaaaacaacccctaaagttcctaaagcccaaagtgctatccacgatccatagcaagcccagcccaacccaacccaacccaacccaccccagtccagccaactggacaatagtctccacacccccccactatcaccgtgagttgtccgcacgcaccgcacgtctcgcagccaaaaaaaaaaagaaagaaaaaaaagaaaaagaaaaaacagcaggtgggtccgggtcgtgggggccggaaacgcgaggaggatcgcgagccagcgacgaggagcttaggcctcatcgttgaagatgcctctgccgacagtggtcccaaagatggacccccacccacgaggagcatcgtggaaaaagaagacgttccaaccacgtcttcaaagcaagtggattgatgtgatatctccactgacgtaagggatgacgcacaatcccactatccttcgaggcctcatcgttgaagatgcctctgccgacagtggtcccaaagatggacccccacccacgaggagcatcgtggaaaaagaagacgttccaaccacgtcttcaaagcaagtggattgatgtgatatctccactgacgtaagggatgacgcacaatcccactatccttcgaagctccctccctccgcttccaaagaaacgccccccatcgccactatatacatacccccccctctcctcccatccccccaacccttctagaaccatcttccacacactcaagccacactattggagaacacacagggacaacacaccataagatccaagggaggcctccgccgccgccggtaaccaccccgcccctctcctctttctttctccgtttttttttccgtctcggtctcgatctttggccttggtagtttgggtgggcgagaggcggcttcgtgcgcgcccagatcggtgcgcgggaggggcgggatctcgcggctggggctctcgccggcgtggatccggcccggatctcgcggggaatggggctctcggatgtagatctgcgatccgccgttgttgggggagatgatggggggtttaaaatttccgccgtgctaaacaagatcaggaagaggggaaaagggcactatggtttatatttttatatatttctgctgcttcgtcaggcttagatgtgctagatctttctttcttctttttgtgggtagaatttgaatccctcagcattgttcatcggtagtttttcttttcatgatttgtgacaaatgcagcctcgtgcggagcttttttgtaggtagaaggcggccgcatggcccagtctaagcacgggttgacgaaggagatgactatgaagtatcgcatggaaggctgcgttgacggccacaaattcgtcattaccggcgagggcatcggctacccctttaaggtaagtttctgcttctacctttgatatatatataataattatcattaattagtagtaatataatatttcaaatatttttttcaaaataaaagaatgtagtatatagcaattgcttttctgtagtttataagtgtgtatattttaatttataacttttctaatatatgaccaaaatttgttgatgtgcagggcaagcaagcgataaacctgtgcgtggtggagggtggccctctgcccttcgccgaggatatactctcagccgccttcatgtacgggaatcgggtgttcacggagtacccgcaagacatcgtggactacttcaagaactcctgccccgccggatacacatgggaccgttccttcctcttcgaggacggagccgtttgcatctgcaacgcggacatcaccgtgtccgtcgaggagaactgcatgtaccacgagtcaaagttctatggagtgaacttcccggccgatggtcccgtgatgaagaaaatgacggacaactgggagccgtcgtgcgagaaaatcattcccgtcccaaaacagggaatcctcaagggcgacgtgtcgatgtacctacttctcaaggacggtggacggctacggtgccagttcgacactgtttacaaggcgaagtcggtgccgaggaagatgccggactggcactttatccagcacaagctgacaagggaggacagaagcgacgctaagaaccagaaatggcacctcaccgagcacgccatcgccagtggctctgcgctgcccgggtgaccctgcaatgtgaccctagacttgtccatcttctggattggccaacttaattaatgtatgaaataaaaggatgcacacatagtgacatgctaatcactataatgtgggcatcaaagttgtgtgttatgtgtaattactaattatctgaataagagaaagagatcatccatatttcttatcctaaatgaatgtcacgtgtctttataattctttgatgaaccagatgcattttattaaccaattccatatacatataaatattaatcatatataattaatatcaattgggttagcaaaacaaatctagtctaggtgtgttttgctaattattgggggatagtgcaaaaagaaatctacgttctcaataattcagatagaaaacttaataaagtgagataatttacatagattgcttttatcctttgatatatgtgaaaccatgcatgatataaggaaaatagatagagaaataattttttacatcgttgaatatgtaaacaatttaattcaagaagctaggaatataaatattgaggagtttatgattattattattattttgatgttcaatgaagttttttttaatttcatatgaagtatacaaaaattcttcatagatttttgtttctatgccgtagttatctttaatatatttgtggttgaagaaatttattgctagaaacgaatggattgtcaatttttttttaaagcaaatatatatgaaattatactgtatattattttagtcatgattaaaatgtggccttaattgaatcatctttctcattcattttttcaaaagcatatcaggatgattgatatttatctattttaaaaattaatttaagggttcaaattaaatttaacttaaaagtgtcctaaccgtagttaaaggtttactttaaaaaaatactatgaaaaatctaatcttctatgaatcgagggcccttagctagttagacgataaaaatgttttaaacgatatatattataaaaaaaaacgtttcaaaaataaatacaaaaatgtttttaaatatatataatttaactcattaaagaaaataaaaatgcaagtgcggtgacaagacaagctaaaagttgcaaaagaaatggcagggctataaggctcacctactcctggatttaccaaattttggttcgtccctatactcgaaaaataaaacaaaataaatttcagtatcttcgtttttgtatgctttgactgtgaggcgaggccaactttcttcttctgtctgagatgaattttgtttgcctcctgtgaaggatgtatcattcaaagtgaatgttttgcaactgccagtagtcccacatcgaccaaatattcttattacagtgtgtttatatagcacctggagaaggaatgggttgtttcaaagattaaataatttctactaagtgtagatacacctactcatctggccattgttaatttctactaagtgtagatttttttta

SEQ ID NO: 87 - DNA, 13155 bp, synthetic construct
  misc_feature 1..13155: note = pWISE3352 Full plasmid sequence
  source 1..13155: mol_type = other DNA
aagcttcgataaaaatgttttaaacgatatatattataaaaaaaaacgtttcaaaaataaatacaaaaatgtttttaaatatatataatttaactcattaaagaaaataaaaatgcaagtgcggtgacaagacaagctaaaagttgcaaaagaaatggcagggctataaggctcacctactcctggatttaccaaattttggttcgtccctatactcgaaaaataaaacaaaataaatttcagtatcttcgtttttgtatgctttgactgtgaggcgaggccaactttcttcttctgtctgagatgaattttgtttgcctcctgtgaaggatgtatcattcaaagtgaatgttttgcaactgccagtagtcccacatcgaccaaatattcttattacagtgtgtttatatagcacctggagaaggaatgggttgtttcaaagattaaataatttctactaagtgtagatttgtaaccaacatcccctgatgataatttctactaagtgtagattttttttactagtgatatccgtcgactggtacctacgcgtagctagcccgtgaagtttctcatctaagcccccatttggacgtgaatgtagacacgtcgaaataaagatttccgaattagaataatttgtttattgctttcgcctataaatacgacggatcgtaatttgtcgttttatcaaaatgtactttcattttataataacgctgcggacatctacatttttgaattgaaaaaaaattggtaattactctttctttttctccatattgaccatcatactcattgctgatccatgtagatttcccggacatgaagccatttacaattgaatatatcctgccgccgctgccgctttgcacccggtggagcttgcatgttggtttctacgcagaactgagccggttaggcagataatttccattgagaactgagccatgtgcaccttccccccaacacggtgagcgacggggcaacggagtgatccacatgggacttttcctagcttggctgccatttttggggtgaggccgttcgcggccgaggggcgcagcccctggggggatgggaggcccgcgttagcgggccgggagggttcgagaagggggggcaccccccttcggcgtgcgcggtcacgcgcacagggcgcagccctggttaaaaacaaggtttataaatattggtttaaaagcaggttaaaagacaggttagcggtggccgaaaaacgggcggaaacccttgcaaatgctggattttctgcctgtggacagcccctcaaatgtcaataggtgcgcccctcatctgtcagcactctgcccctcaagtgtcaaggatcgcgcccctcatctgtcagtagtcgcgcccctcaagtgtcaataccgcagggcacttatccccaggcttgtccacatcatctgtgggaaactcgcgtaaaatcaggcgttttcgccgatttgcgaggctggccagctccacgtcgccggccgaaatcgagcctgcccctcatctgtcaacgccgcgccgggtgagtcggcccctcaagtgtcaacgtccgcccctcatctgtcagtgagggccaagttttccgcgaggtatccacaacgccggcggccggccgcggtgtctcgcacacggcttcgacggcgtttctggcgcgtttgcagggccatagacggccgccagcccagcggcgagggcaaccagcccggtgagcgtcggaaagggtcgatcgaccgatgcccttgagagccttcaacccagtcagctccttccggtgggcgcggggcatgactatcgtcgccgcacttatgactgtcttctttatcatgcaactcgtaggacaggtgccggcagcgctctgggtcattttcggcgaggaccgctttcgctggagcgcgacgatgatcggcctgtcgcttgcggtattcggaatcttgcacgccctcgctcaagccttcgtcactggtcccgccaccaaacgtttcggcgagaagcaggccattatcgccggcatggcggccgacgcgctgggctacgtcttgctggcgttcgcgacgcgaggctggatggccttccccattatgattcttctcgcttccggcggcatcgggatgcccgcgttgcaggccatgctgtccaggcaggtagatgacgaccatcagggacagcttcaaggatcgctcgcggctcttaccagcctaacttcgatcattggaccgctgatcgtcacggcgatttatgccgcctcggcgagcacatggaacgggttggcatggattgtaggcgccgccctataccttgtctgcctccccgcgttgcgtcgcggtgcatggagccgggccacctcgacctgaatggaagccggcggcacctcgctaacggattcaccactccaagaattggagccaatcaattcttgcggagaactgtgaatgcgcaaaccaacccttggcagaacatatccatcgcgtccgccatctccagcagccgcacgcggcgcatctcgggcagcgttgggtcctggccacgggtgcgcatgatcgtgctcctgtcgttgaggacccggctaggctggcggggttgccttactggttagcagaatgaatcaccgatacgcgagcgaacgtgaagcgactgctgctgcaaaacgtctgcgacctgagcaacaacatgaatggtcttcggtttccgtgtttcgtaaagtctggaaacgcggaagtcagcgccctgcaccattatgttccggatctgcatcgcaggatgctgctggctaccctgtggaacacctacatctgtattaacgaagcgctggcattgaccctgagtgatttttctctggtcccgccgcatccataccgccagttgtttaccctcacaacgttccagtaaccgggcatgttcatcatcagtaacccgtatcgtgagcatcctctctcgtttcatcggtatcattacccccatgaacagaaatcccccttacacggaggcatcagtgaccaaacaggaaaaaaccgcccttaacatggcccgctttatcagaagccagacattaacgcttctggagaaactcaacgagctggacgcggatgaacaggcagacatctgtgaatcgcttcacgaccacgctgatgagctttaccgcagctgcctcgcgcgtttcggtgatgacggtgaaaacctctgacacatgcagctcccggagacggtcacagcttgtctgtaagcggatgccgggagcagacaagcccgtcagggcgcgtcagcgggtgttggcgggtgtcggggcgcagccatgacccagtcacgtagcgatagcggagtgtatactggcttaactatgcggcatcagagcagattgtactgagagtgcaccatatgcggtgtgaaataccgcacagatgcgtaaggagaaaataccgcatcaggcgctcttccgcttcctcgctcactgactcgctgcgctcggtcgttcggctgcggcgagcggtatcagctcactcaaaggcggtaatacggttatccacagaatcaggggataacgcaggaaagaacatgtgagcaaaaggccagcaaaaggccaggaaccgtaaaaaggccgcgttgctggcgtttttccataggctccgcccccctgacgagcatcacaaaaatcgacgctcaagtcagaggtggcgaaacccgacaggactataaagataccaggcgtttccccctggaagctccctcgtgcgctctcctgttccgaccctgccgcttaccggatacctgtccgcctttctcccttcgggaagcgtggcgctttctcatagctcacgctgtaggtatctcagttcggtgtaggtcgttcgctccaagctgggctgtgtgcacgaaccccccgttcagcccgaccgctgcgccttatccggtaactatcgtcttgagtccaacccggtaagacacgacttatcgccactggcagcagccactggtaacaggattagcagagcgaggtatgtaggcggtgctacagagttcttgaagtggtggcctaactacggctacactagaaggacagtatttggtatctgcgctctgctgaagccagttaccttcggaaaaagagttggtagctcttgatccggcaaacaaaccaccgctggtagcggtggtttttttgtttgcaagcagcagattacgcgcagaaaaaaaggatctcaagaagatcctttgatcttttctacggggtctgacgctcagtggaacgaaaactcacgttaagggattttggtcatgagattatcaaaaaggatcttcacctagatccttttaaattaaaaatgaagttttaaatcaatctaaagtatatatgagtaaacttggtctgacagttaccaatgcttaatcagtgaggcacctatctcagcgatctgtctatttcgttcatccatagttgcctgactccccgtcgtgtagataactacgatacgggagggcttaccatctggccccagtgctgcaatgataccgcgagacccacgctcaccggctccagatttatcagcaataaaccagccagccggaagggccgagcgcagaagtggtcctgcaactttatccgcctccatccagtctattaattgttgccgggaagctagagtaagtagttcgccagttaatagtttgcgcaacgttgttgccattgctgcaggtcgggagcacaggatgacgcctaacaattcattcaagccgacaccgcttcgcggcgcggcttaattcaggagttaaacatcatgagtattcaacatttccgtgtcgcccttattcccttttttgcggcattttgccttcctgtttttgctcacccagaaacgctggtgaaagtaaaagatgctgaagatcagttgggtgcacgagtgggttacatcgaactggatctcaacagcggtaagatccttgagagttttcgccccgaagaacgttttccaatgatgagcacttttaaagttctgctatgtggcgcggtattatcccgtattgacgccgggcaagagcaactcggtcgccgcatacactattctcagaatgacttggttgagtactcaccagtcacagaaaagcatcttacggatggcatgacagtaagagaattatgcagtgctgccataaccatgagtgataacactgcggccaacttacttctgacaacgatcggaggaccgaaggagctaaccgcttttttgcacaacatgggggatcatgtaactcgccttgatcgttgggaaccggagctgaatgaagccataccaaacgacgagcgtgacaccacgatgcctgtagcaatggcaacaacgttgcgcaaactattaactggcgaactacttactctagcttcccggcaacaattaatagactggatggaggcggataaagttgcaggaccacttctgcgctcggcccttccggctggctggtttattgctgataaatctggagccggtgagcgtggttctcgcggtatcattgcagcactggggccagatggtaagccctcccgtatcgtagttatctacacgacggggagtcaggcaactatggatgaacgaaatagacagatcgctgagataggtgcctcactgattaagcattggtaatgtctaacaattcgttcaagccgacgccgcttcgcggcgcggcttaactcaagcgttagatgctgcaggcatcgtggtgtcacgctcgtcgtttggtatggcttcattcagctccggttcccaacgatcaaggcgagttacatgatcccccatgttgtgcaaaaaagcggttagctccttcggtcctccgatcgaggatttttcggcgctgcgctacgtccgcgaccgcgttgagggatcaagccacagcagcccactcgaccttctagccgacccagacgagccaagggatctttttggaatgctgctccgtcgtcaggctttccgacgtttgggtggttgaacagaagtcattatcgcacggaatgccaagcactcccgaggggaaccctgtggttggcatgcacatacaaatggacgaacggataaaccttttcacgcccttttaaatatccgattattctaataaacgctcttttctcttaggtttacccgccaatatatcctgtcaaacactgatagtttaaactgaaggcgggaaacgacaatctcctaggttggtgtgaaacagatgatttgctgctgtaacaaagtaaattatgtctcgacttttaaggcccctttcattttattagattattttattttaattaatgttcttgtcccattttgcaacagatggatgctactacacccaagtattccaaggccaggtatgatgaaattgtgaaggaagtctcttcctacttgaagaaagtaggatacaaccctgacaagattccttttgttcctatctctggttttgagggagacaacatgattgagaggtccacaaaccttgactggtacaagggtccaactctgcttgatgcacttgaccagattagtgagcccaagaggccctctgacaagcccctcaggcttccccttcaggatgtgtacaagattggaggtattggaactgtgccagtgggacgtgttgagaccggtgtcttgaagcctggaatggtggtgacttttgcaccaactggactgacaactgaagtcaagtctgtggagatgcaccatgaatctcttacagaggcacatcctggtgacaatgtgggattcaatgttaagaatgttgctgttaaggatttgaagcgtggttatgttgcctcaaactcaaaggatgaccctgcaaaggaggctgctaacttcacagcccaagtcatcatcatgaaccaccctggtcagattggaaatggctatgcccctgtcctcgactgccacacttctcacattgctgtcaagtttgctgaactcatgaccaagattgacaggcgatccggcaaagagcttgagaaggagcccaagtttttgaagaacggtgatgctggttttgttaagatgattccaaccaaacccatggttgttgaaactttctccgagtatcctccacttggtaggtttgctgttagggacatgcgtcaaactgttgctgtgggagtcatcaagaacgttgagaagaaggatcctaccggagccaaggtcaccaaggctgcccagaagaagaagtcaaatgctgctgatgaagtggcaactcaattactgaattttgacctcttgaagcttgccggtgatgttgagtctaaccctggaccaatggcgcaagttagcagaatctgcaatggtgtgcagaacccatctcttatctccaatctctcgaaatccagtcaacgcaaatctcccttatcggtttctctgaagacgcagcagcatccacgagcttatccgatttcgtcgtcgtggggattgaagaagagtgggatgacgttaattggctctgagcttcgtcctcttaaggtcatgtcttctgtttccacggcgtgcatgggggaagcggtgatcgccgaagtatcgactcaactatcagaggtagttggcgtcatcgagcgccatctcgaaccgacgttgctggccgtacatttgtacggctccgcagtggatggcggcctgaagccacacagtgatattgatttgctggttacggtgaccgtaaggcttgatgaaacaacgcggcgagctttgatcaacgaccttttggaaacttcggcttcccctggagagagcgagattctccgcgctgtagaagtcaccattgttgtgcacgacgacatcattccgtggcgttatccagctaagcgcgaactgcaatttggagaatggcagcgcaatgacattcttgcaggtatcttcgagccagccacgatcgacattgatctggctatcttgctgacaaaagcaagagaacatagcgttgccttggtaggtccagcggcggaggaactctttgatccggttcctgaacaggatctatttgaggcgctaaatgaaaccttaacgctatggaactcgccgcccgactgggctggcgatgagcgaaatgtagtgcttacgttgtcccgcatttggtacagcgcagtaaccggcaaaatcgcgccgaaggatgtcgctgccgactgggcaatggagcgcctgccggcccagtatcagcccgtcatacttgaagctagacaggcttatcttggacaagaagaagatcgcttggcctcgcgcgcagatcagttggaagaatttgtccactacgtgaaaggcgagatcaccaaggtagtcggcaaatgaatcgtgcgggctggttcatcagggaatgttggctacaatcaatgttggtttcttttctgtactcttgtgtcttcttttctaggtagcttgtttttcggacaaagtttgaagtctccaccatcatctcgcaactgttgttcccagaactgggttcttgatcgacggtggcaaaattgcttttatttatctgtgttttaatgtgttgtgtttgtcggaacccctgattacatttttgttaagcgcagcgagtttcaggactttgctgcgttgtgttgctttggtttattaaatgtcaactttctatttgtagtgttcaatttttggcttggtttgctttttctttataatttgtgttcaaattttggcttggtttgcttttactataatttgtgttcaaattttgggttggattttttaacgatcggctgtttgctcttcttcctctgttttgatgtgttcgtgactatgcaagaatcttcaattttgctaaaataaacttgctttgacaacatagaatcaaatccgagtgctttaatattcggtggtttgtttttatttttggttttatgaaagttaaaattttaaaagtaaatcgataaggtataattgtggtttttatttatcgagaattttttaagtgaatcgatataatttatttcccctaaaataaaataccaaagaatcgaattcgaactttgtctttaataaaactactaatttaatcattatttgttctgtgtaagcatgagaaataaattctacttatcttttagtttaaaaccaaaacaggttaagaataatttttctaaggccgttatcaaggtcaccaaaaatctattcgatctgaccatatattttcgatacttgtacgattcgcagatgttgattggaaattgcaatgaataaattacaaatgccaaatccgattatgcaatgaatgaattacaagtgcatttatccgttttgaatctgttcatgtctaccaatgggagagatttttttcctgcatctgccatacatatgggaagaccgaaaatactttcctaggctggcagcacatcccccgttcgcgagctggcgtaacagcgaagaggcccgggcgcgcctagctaactagctagccacgtgactcgcagaacgttgtgtggcgagacggaaagaaagtcacgcctccaaagagtgcagcatctcttctggctctcacggtcctctgtggatccatcgatatcgaattcctgcaggctcgaggtcattcatatgcttgagaagagagtcgggatagtccaaaataaaacaaaggtaagattacctggtcaaaagtgaaaacatcagttaaaaggtggtataaagtaaaatatcggtaataaaaggtggcccaaagtgaaatttactcttttctactattataaaaattgaggatgtttttgtcggtactttgatacgtcatttttgtatgaattggtttttaagtttattcgcttttggaaatgcatatctgtatttgagtcgggttttaagttcgtttgcttttgtaaatacagagggatttgtataagaaatatctttagaaaaacccatatgctaatttgacataatttttgagaaaaatatatattcaggcgaattctcacaatgaacaataataagattaaaatagctttcccccgttgcagcgcatgggtattttttctagtaaaaataaaagataaacttagactcaaaacatttacaaaaacaacccctaaagttcctaaagcccaaagtgctatccacgatccatagcaagcccagcccaacccaacccaacccaacccaccccagtccagccaactggacaatagtctccacacccccccactatcaccgtgagttgtccgcacgcaccgcacgtctcgcagccaaaaaaaaaaagaaagaaaaaaaagaaaaagaaaaaacagcaggtgggtccgggtcgtgggggccggaaacgcgaggaggatcgcgagccagcgacgaggagcttaggcctcatcgttgaagatgcctctgccgacagtggtcccaaagatggacccccacccacgaggagcatcgtggaaaaagaagacgttccaaccacgtcttcaaagcaagtggattgatgtgatatctccactgacgtaagggatgacgcacaatcccactatccttcgaggcctcatcgttgaagatgcctctgccgacagtggtcccaaagatggacccccacccacgaggagcatcgtggaaaaagaagacgttccaaccacgtcttcaaagcaagtggattgatgtgatatctccactgacgtaagggatgacgcacaatcccactatccttcgaagctccctccctccgcttccaaagaaacgccccccatcgccactatatacatacccccccctctcctcccatccccccaacccttctagaaccatcttccacacactcaagccacactattggagaacacacagggacaacacaccataagatccaagggaggcctccgccgccgccggtaaccaccccgcccctctcctctttctttctccgtttttttttccgtctcggtctcgatctttggccttggtagtttgggtgggcgagaggcggcttcgtgcgcgcccagatcggtgcgcgggaggggcgggatctcgcggctggggctctcgccggcgtggatccggcccggatctcgcggggaatggggctctcggatgtagatctgcgatccgccgttgttgggggagatgatggggggtttaaaatttccgccgtgctaaacaagatcaggaagaggggaaaagggcactatggtttatatttttatatatttctgctgcttcgtcaggcttagatgtgctagatctttctttcttctttttgtgggtagaatttgaatccctcagcattgttcatcggtagtttttcttttcatgatttgtgacaaatgcagcctcgtgcggagcttttttgtaggtagaaggcggccgcatggcccagtctaagcacgggttgacgaaggagatgactatgaagtatcgcatggaaggctgcgttgacggccacaaattcgtcattaccggcgagggcatcggctacccctttaaggtaagtttctgcttctacctttgatatatatataataattatcattaattagtagtaatataatatttcaaatatttttttcaaaataaaagaatgtagtatatagcaattgcttttctgtagtttataagtgtgtatattttaatttataacttttctaatatatgaccaaaatttgttgatgtgcagggcaagcaagcgataaacctgtgcgtggtggagggtggccctctgcccttcgccgaggatatactctcagccgccttcatgtacgggaatcgggtgttcacggagtacccgcaagacatcgtggactacttcaagaactcctgccccgccggatacacatgggaccgttccttcctcttcgaggacggagccgtttgcatctgcaacgcggacatcaccgtgtccgtcgaggagaactgcatgtaccacgagtcaaagttctatggagtgaacttcccggccgatggtcccgtgatgaagaaaatgacggacaactgggagccgtcgtgcgagaaaatcattcccgtcccaaaacagggaatcctcaagggcgacgtgtcgatgtacctacttctcaaggacggtggacggctacggtgccagttcgacactgtttacaaggcgaagtcggtgccgaggaagatgccggactggcactttatccagcacaagctgacaagggaggacagaagcgacgctaagaaccagaaatggcacctcaccgagcacgccatcgccagtggctctgcgctgcccgggtgaccctgcaatgtgaccctagacttgtccatcttctggattggccaacttaattaatgtatgaaataaaaggatgcacacatagtgacatgctaatcactataatgtgggcatcaaagttgtgtgttatgtgtaattactaattatctgaataagagaaagagatcatccatatttcttatcctaaatgaatgtcacgtgtctttataattctttgatgaaccagatgcattttattaaccaattccatatacatataaatattaatcatatataattaatatcaattgggttagcaaaacaaatctagtctaggtgtgttttgctaattattgggggatagtgcaaaaagaaatctacgttctcaataattcagatagaaaacttaataaagtgagataatttacatagattgcttttatcctttgatatatgtgaaaccatgcatgatataaggaaaatagatagagaaataattttttacatcgttgaatatgtaaacaatttaattcaagaagctaggaatataaatattgaggagtttatgattattattattattttgatgttcaatgaagttttttttaatttcatatgaagtatacaaaaattcttcatagatttttgtttctatgccgtagttatctttaatatatttgtggttgaagaaatttattgctagaaacgaatggattgtcaatttttttttaaagcaaatatatatgaaattatactgtatattattttagtcatgattaaaatgtggccttaattgaatcatctttctcattcattttttcaaaagcatatcaggatgattgatatttatctattttaaaaattaatttaagggttcaaattaaatttaacttaaaagtgtcctaaccgtagttaaaggtttactttaaaaaaatactatgaaaaatctaatcttctatgaatcgagggcccttagctagttag

SEQ ID NO: 88 - DNA, 13155 bp, synthetic construct
  misc_feature 1..13155: note = pWISE3358 Full plasmid sequence
  source 1..13155: mol_type = other DNA
aagcttcgataaaaatgttttaaacgatatatattataaaaaaaaacgtttcaaaaataaatacaaaaatgtttttaaatatatataatttaactcattaaagaaaataaaaatgcaagtgcggtgacaagacaagctaaaagttgcaaaagaaatggcagggctataaggctcacctactcctggatttaccaaattttggttcgtccctatactcgaaaaataaaacaaaataaatttcagtatcttcgtttttgtatgctttgactgtgaggcgaggccaactttcttcttctgtctgagatgaattttgtttgcctcctgtgaaggatgtatcattcaaagtgaatgttttgcaactgccagtagtcccacatcgaccaaatattcttattacagtgtgtttatatagcacctggagaaggaatgggttgtttcaaagattaaataatttctactaagtgtagatttgtaaccaacatcccctgatgataatttctactaagtgtagattttttttactagtgatatccgtcgactggtacctacgcgtagctagcccgtgaagtttctcatctaagcccccatttggacgtgaatgtagacacgtcgaaataaagatttccgaattagaataatttgtttattgctttcgcctataaatacgacggatcgtaatttgtcgttttatcaaaatgtactttcattttataataacgctgcggacatctacatttttgaattgaaaaaaaattggtaattactctttctttttctccatattgaccatcatactcattgctgatccatgtagatttcccggacatgaagccatttacaattgaatatatcctgccgccgctgccgctttgcacccggtggagcttgcatgttggtttctacgcagaactgagccggttaggcagataatttccattgagaactgagccatgtgcaccttccccccaacacggtgagcgacggggcaacggagtgatccacatgggacttttcctagcttggctgccatttttggggtgaggccgttcgcggccgaggggcgcagcccctggggggatgggaggcccgcgttagcgggccgggagggttcgagaagggggggcaccccccttcggcgtgcgcggtcacgcgcacagggcgcagccctggttaaaaacaaggtttataaatattggtttaaaagcaggttaaaagacaggttagcggtggccgaaaaacgggcggaaacccttgcaaatgctggattttctgcctgtggacagcccctcaaatgtcaataggtgcgcccctcatctgtcagcactctgcccctcaagtgtcaaggatcgcgcccctcatctgtcagtagtcgcgcccctcaagtgtcaataccgcagggcacttatccccaggcttgtccacatcatctgtgggaaactcgcgtaaaatcaggcgttttcgccgatttgcgaggctggccagctccacgtcgccggccgaaatcgagcctgcccctcatctgtcaacgccgcgccgggtgagtcggcccctcaagtgtcaacgtccgcccctcatctgtcagtgagggccaagttttccgcgaggtatccacaacgccggcggccggccgcggtgtctcgcacacggcttcgacggcgtttctggcgcgtttgcagggccatagacggccgccagcccagcggcgagggcaaccagcccggtgagcgtcggaaagggtcgatcgaccgatgcccttgagagccttcaacccagtcagctccttccggtgggcgcggggcatgactatcgtcgccgcacttatgactgtcttctttatcatgcaactcgtaggacaggtgccggcagcgctctgggtcattttcggcgaggaccgctttcgctggagcgcgacgatgatcggcctgtcgcttgcggtattcggaatcttgcacgccctcgctcaagccttcgtcactggtcccgccaccaaacgtttcggcgagaagcaggccattatcgccggcatggcggccgacgcgctgggctacgtcttgctggcgttcgcgacgcgaggctggatggccttccccattatgattcttctcgcttccggcggcatcgggatgcccgcgttgcaggccatgctgtccaggcaggtagatgacgaccatcagggacagcttcaaggatcgctcgcggctcttaccagcctaacttcgatcattggaccgctgatcgtcacggcgatttatgccgcctcggcgagcacatggaacgggttggcatggattgtaggcgccgccctataccttgtctgcctccccgcgttgcgtcgcggtgcatggagccgggccacctcgacctgaatggaagccggcggcacctcgctaacggattcaccactccaagaattggagccaatcaattcttgcggagaactgtgaatgcgcaaaccaacccttggcagaacatatccatcgcgtccgccatctccagcagccgcacgcggcgcatctcgggcagcgttgggtcctggccacgggtgcgcatgatcgtgctcctgtcgttgaggacccggctaggctggcggggttgccttactggttagcagaatgaatcaccgatacgcgagcgaacgtgaagcgactgctgctgcaaaacgtctgcgacctgagcaacaacatgaatggtcttcggtttccgtgtttcgtaaagtctggaaacgcggaagtcagcgccctgcaccattatgttccggatctgcatcgcaggatgctgctggctaccctgtggaacacctacatctgtattaacgaagcgctggcattgaccctgagtgatttttctctggtcccgccgcatccataccgccagttgtttaccctcacaacgttccagtaaccgggcatgttcatcatcagtaacccgtatcgtgagcatcctctctcgtttcatcggtatcattacccccatgaacagaaatcccccttacacggaggcatcagtgaccaaacaggaaaaaaccgcccttaacatggcccgctttatcagaagccagacattaacgcttctggagaaactcaacgagctggacgcggatgaacaggcagacatctgtgaatcgcttcacgaccacgctgatgagctttaccgcagctgcctcgcgcgtttcggtgatgacggtgaaaacctctgacacatgcagctcccggagacggtcacagcttgtctgtaagcggatgccgggagcagacaagcccgtcagggcgcgtcagcgggtgttggcgggtgtcggggcgcagccatgacccagtcacgtagcgatagcggagtgtatactggcttaactatgcggcatcagagcagattgtactgagagtgcaccatatgcggtgtgaaataccgcacagatgcgtaaggagaaaataccgcatcaggcgctcttccgcttcctcgctcactgactcgctgcgctcggtcgttcggctgcggcgagcggtatcagctcactcaaaggcggtaatacggttatccacagaatcaggggataacgcaggaaagaacatgtgagcaaaaggccagcaaaaggccaggaaccgtaaaaaggccgcgttgctggcgtttttccataggctccgcccccctgacgagcatcacaaaaatcgacgctcaagtcagaggtggcgaaacccgacaggactataaagataccaggcgtttccccctggaagctccctcgtgcgctctcctgttccgaccctgccgcttaccggatacctgtccgcctttctcccttcgggaagcgtggcgctttctcatagctcacgctgtaggtatctcagttcggtgtaggtcgttcgctccaagctgggctgtgtgcacgaaccccccgttcagcccgaccgctgcgccttatccggtaactatcgtcttgagtccaacccggtaagacacgacttatcgccactggcagcagccactggtaacaggattagcagagcgaggtatgtaggcggtgctacagagttcttgaagtggtggcctaactacggctacactagaaggacagtatttggtatctgcgctctgctgaagccagttaccttcggaaaaagagttggtagctcttgatccggcaaacaaaccaccgctggtagcggtggtttttttgtttgcaagcagcagattacgcgcagaaaaaaaggatctcaagaagatcctttgatcttttctacggggtctgacgctcagtggaacgaaaactcacgttaagggattttggtcatgagattatcaaaaaggatcttcacctagatccttttaaattaaaaatgaagttttaaatcaatctaaagtatatatgagtaaacttggtctgacagttaccaatgcttaatcagtgaggcacctatctcagcgatctgtctatttcgttcatccatagttgcctgactccccgtcgtgtagataactacgatacgggagggcttaccatctggccccagtgctgcaatgataccgcgagacccacgctcaccggctccagatttatcagcaataaaccagccagccggaagggccgagcgcagaagtggtcctgcaactttatccgcctccatccagtctattaattgttgccgggaagctagagtaagtagttcgccagttaatagtttgcgcaacgttgttgccattgctgcaggtcgggagcacaggatgacgcctaacaattcattcaagccgacaccgcttcgcggcgcggcttaattcaggagttaaacatcatgagtattcaacatttccgtgtcgcccttattcccttttttgcggcattttgccttcctgtttttgctcacccagaaacgctggtgaaagtaaaagatgctgaagatcagttgggtgcacgagtgggttacatcgaactggatctcaacagcggtaagatccttgagagttttcgccccgaagaacgttttccaatgatgagcacttttaaagttctgctatgtggcgcggtattatcccgtattgacgccgggcaagagcaactcggtcgccgcatacactattctcagaatgacttggttgagtactcaccagtcacagaaaagcatcttacggatggcatgacagtaagagaattatgcagtgctgccataaccatgagtgataacactgcggccaacttacttctgacaacgatcggaggaccgaaggagctaaccgcttttttgcacaacatgggggatcatgtaactcgccttgatcgttgggaaccggagctgaatgaagccataccaaacgacgagcgtgacaccacgatgcctgtagcaatggcaacaacgttgcgcaaactattaactggcgaactacttactctagcttcccggcaacaattaatagactggatggaggcggataaagttgcaggaccacttctgcgctcggcccttccggctggctggtttattgctgataaatctggagccggtgagcgtggttctcgcggtatcattgcagcactggggccagatggtaagccctcccgtatcgtagttatctacacgacggggagtcaggcaactatggatgaacgaaatagacagatcgctgagataggtgcctcactgattaagcattggtaatgtctaacaattcgttcaagccgacgccgcttcgcggcgcggcttaactcaagcgttagatgctgcaggcatcgtggtgtcacgctcgtcgtttggtatggcttcattcagctccggttcccaacgatcaaggcgagttacatgatcccccatgttgtgcaaaaaagcggttagctccttcggtcctccgatcgaggatttttcggcgctgcgctacgtccgcgaccgcgttgagggatcaagccacagcagcccactcgaccttctagccgacccagacgagccaagggatctttttggaatgctgctccgtcgtcaggctttccgacgtttgggtggttgaacagaagtcattatcgcacggaatgccaagcactcccgaggggaaccctgtggttggcatgcacatacaaatggacgaacggataaaccttttcacgcccttttaaatatccgattattctaataaacgctcttttctcttaggtttacccgccaatatatcctgtcaaacactgatagtttaaactgaaggcgggaaacgacaatctcctaggaaagtattttcggtcttcccatatgtatggcagatgcaggaaaaaaatctctcccattggtagacatgaacagattcaaaacggataaatgcacttgtaattcattcattgcataatcggatttggcatttgtaatttattcattgcaatttccaatcaacatctgcgaatcgtacaagtatcgaaaatatatggtcagatcgaatagatttttggtgaccttgataacggccttagaaaaattattcttaacctgttttggttttaaactaaaagataagtagaatttatttctcatgcttacacagaacaaataatgattaaattagtagttttattaaagacaaagttcgaattcgattctttggtattttattttaggggaaataaattatatcgattcacttaaaaaattctcgataaataaaaaccacaattataccttatcgatttacttttaaaattttaactttcataaaaccaaaaataaaaacaaaccaccgaatattaaagcactcggatttgattctatgttgtcaaagcaagtttattttagcaaaattgaagattcttgcatagtcacgaacacatcaaaacagaggaagaagagcaaacagccgatcgttaaaaaatccaacccaaaatttgaacacaaattatagtaaaagcaaaccaagccaaaatttgaacacaaattataaagaaaaagcaaaccaagccaaaaattgaacactacaaatagaaagttgacatttaataaaccaaagcaacacaacgcagcaaagtcctgaaactcgctgcgcttaacaaaaatgtaatcaggggttccgacaaacacaacacattaaaacacagataaataaaagcaattttgccaccgtcgatcaagaacccagttctgggaacaacagttgcgagatgatggtggagacttcaaactttgtccgaaaaacaagctacctagaaaagaagacacaagagtacagaaaagaaaccaacattgattgtagccaacattccctgatgaaccagcccgcacgattcatttgccgactaccttggtgatctcgcctttcacgtagtggacaaattcttccaactgatctgcgcgcgaggccaagcgatcttcttcttgtccaagataagcctgtctagcttcaagtatgacgggctgatactgggccggcaggcgctccattgcccagtcggcagcgacatccttcggcgcgattttgccggttactgcgctgtaccaaatgcgggacaacgtaagcactacatttcgctcatcgccagcccagtcgggcggcgagttccatagcgttaaggtttcatttagcgcctcaaatagatcctgttcaggaaccggatcaaagagttcctccgccgctggacctaccaaggcaacgctatgttctcttgcttttgtcagcaagatagccagatcaatgtcgatcgtggctggctcgaagatacctgcaagaatgtcattgcgctgccattctccaaattgcagttcgcgcttagctggataacgccacggaatgatgtcgtcgtgcacaacaatggtgacttctacagcgcggagaatctcgctctctccaggggaagccgaagtttccaaaaggtcgttgatcaaagctcgccgcgttgtttcatcaagccttacggtcaccgtaaccagcaaatcaatatcactgtgtggcttcaggccgccatccactgcggagccgtacaaatgtacggccagcaacgtcggttcgagatggcgctcgatgacgccaactacctctgatagttgagtcgatacttcggcgatcaccgcttcccccatgcacgccgtggaaacagaagacatgaccttaagaggacgaagctcagagccaattaacgtcatcccactcttcttcaatccccacgacgacgaaatcggataagctcgtggatgctgctgcgtcttcagagaaaccgataagggagatttgcgttgactggatttcgagagattggagataagagatgggttctgcacaccattgcagattctgctaacttgcgccattggtccagggttagactcaacatcaccggcaagcttcaagaggtcaaaattcagtaattgagttgccacttcatcagcagcatttgacttcttcttctgggcagccttggtgaccttggctccggtaggatccttcttctcaacgttcttgatgactcccacagcaacagtttgacgcatgtccctaacagcaaacctaccaagtggaggatactcggagaaagtttcaacaaccatgggtttggttggaatcatcttaacaaaaccagcatcaccgttcttcaaaaacttgggctccttctcaagctctttgccggatcgcctgtcaatcttggtcatgagttcagcaaacttgacagcaatgtgagaagtgtggcagtcgaggacaggggcatagccatttccaatctgaccagggtggttcatgatgatgacttgggctgtgaagttagcagcctcctttgcagggtcatcctttgagtttgaggcaacataaccacgcttcaaatccttaacagcaacattcttaacattgaatcccacattgtcaccaggatgtgcctctgtaagagattcatggtgcatctccacagacttgacttcagttgtcagtccagttggtgcaaaagtcaccaccattccaggcttcaagacaccggtctcaacacgtcccactggcacagttccaatacctccaatcttgtacacatcctgaaggggaagcctgaggggcttgtcagagggcctcttgggctcactaatctggtcaagtgcatcaagcagagttggacccttgtaccagtcaaggtttgtggacctctcaatcatgttgtctccctcaaaaccagagataggaacaaaaggaatcttgtcagggttgtatcctactttcttcaagtaggaagagacttccttcacaatttcatcatacctggccttggaatacttgggtgtagtagcatccatctgttgcaaaatgggacaagaacattaattaaaataaaataatctaataaaatgaaaggggccttaaaagtcgagacataatttactttgttacagcagcaaatcatctgtttcacaccaacctaggctggcagcacatcccccgttcgcgagctggcgtaacagcgaagaggcccgggcgcgcctagctaactagctagccacgtgactcgcagaacgttgtgtggcgagacggaaagaaagtcacgcctccaaagagtgcagcatctcttctggctctcacggtcctctgtggatccatcgatatcgaattcctgcaggctcgaggtcattcatatgcttgagaagagagtcgggatagtccaaaataaaacaaaggtaagattacctggtcaaaagtgaaaacatcagttaaaaggtggtataaagtaaaatatcggtaataaaaggtggcccaaagtgaaatttactcttttctactattataaaaattgaggatgtttttgtcggtactttgatacgtcatttttgtatgaattggtttttaagtttattcgcttttggaaatgcatatctgtatttgagtcgggttttaagttcgtttgcttttgtaaatacagagggatttgtataagaaatatctttagaaaaacccatatgctaatttgacataatttttgagaaaaatatatattcaggcgaattctcacaatgaacaataataagattaaaatagctttcccccgttgcagcgcatgggtattttttctagtaaaaataaaagataaacttagactcaaaacatttacaaaaacaacccctaaagttcctaaagcccaaagtgctatccacgatccatagcaagcccagcccaacccaacccaacccaacccaccccagtccagccaactggacaatagtctccacacccccccactatcaccgtgagttgtccgcacgcaccgcacgtctcgcagccaaaaaaaaaaagaaagaaaaaaaagaaaaagaaaaaacagcaggtgggtccgggtcgtgggggccggaaacgcgaggaggatcgcgagccagcgacgaggagcttaggcctcatcgttgaagatgcctctgccgacagtggtcccaaagatggacccccacccacgaggagcatcgtggaaaaagaagacgttccaaccacgtcttcaaagcaagtggattgatgtgatatctccactgacgtaagggatgacgcacaatcccactatccttcgaggcctcatcgttgaagatgcctctgccgacagtggtcccaaagatggacccccacccacgaggagcatcgtggaaaaagaagacgttccaaccacgtcttcaaagcaagtggattgatgtgatatctccactgacgtaagggatgacgcacaatcccactatccttcgaagctccctccctccgcttccaaagaaacgccccccatcgccactatatacatacccccccctctcctcccatccccccaacccttctagaaccatcttccacacactcaagccacactattggagaacacacagggacaacacaccataagatccaagggaggcctccgccgccgccggtaaccaccccgcccctctcctctttctttctccgtttttttttccgtctcggtctcgatctttggccttggtagtttgggtgggcgagaggcggcttcgtgcgcgcccagatcggtgcgcgggaggggcgggatctcgcggctggggctctcgccggcgtggatccggcccggatctcgcggggaatggggctctcggatgtagatctgcgatccgccgttgttgggggagatgatggggggtttaaaatttccgccgtgctaaacaagatcaggaagaggggaaaagggcactatggtttatatttttatatatttctgctgcttcgtcaggcttagatgtgctagatctttctttcttctttttgtgggtagaatttgaatccctcagcattgttcatcggtagtttttcttttcatgatttgtgacaaatgcagcctcgtgcggagcttttttgtaggtagaaggcggccgcatggcccagtctaagcacgggttgacgaaggagatgactatgaagtatcgcatggaaggctgcgttgacggccacaaattcgtcattaccggcgagggcatcggctacccctttaaggtaagtttctgcttctacctttgatatatatataataattatcattaattagtagtaatataatatttcaaatatttttttcaaaataaaagaatgtagtatatagcaattgcttttctgtagtttataagtgtgtatattttaatttataacttttctaatatatgaccaaaatttgttgatgtgcagggcaagcaagcgataaacctgtgcgtggtggagggtggccctctgcccttcgccgaggatatactctcagccgccttcatgtacgggaatcgggtgttcacggagtacccgcaagacatcgtggactacttcaagaactcctgccccgccggatacacatgggaccgttccttcctcttcgaggacggagccgtttgcatctgcaacgcggacatcaccgtgtccgtcgaggagaactgcatgtaccacgagtcaaagttctatggagtgaacttcccggccgatggtcccgtgatgaagaaaatgacggacaactgggagccgtcgtgcgagaaaatcattcccgtcccaaaacagggaatcctcaagggcgacgtgtcgatgtacctacttctcaaggacggtggacggctacggtgccagttcgacactgtttacaaggcgaagtcggtgccgaggaagatgccggactggcactttatccagcacaagctgacaagggaggacagaagcgacgctaagaaccagaaatggcacctcaccgagcacgccatcgccagtggctctgcgctgcccgggtgaccctgcaatgtgaccctagacttgtccatcttctggattggccaacttaattaatgtatgaaataaaaggatgcacacatagtgacatgctaatcactataatgtgggcatcaaagttgtgtgttatgtgtaattactaattatctgaataagagaaagagatcatccatatttcttatcctaaatgaatgtcacgtgtctttataattctttgatgaaccagatgcattttattaaccaattccatatacatataaatattaatcatatataattaatatcaattgggttagcaaaacaaatctagtctaggtgtgttttgctaattattgggggatagtgcaaaaagaaatctacgttctcaataattcagatagaaaacttaataaagtgagataatttacatagattgcttttatcctttgatatatgtgaaaccatgcatgatataaggaaaatagatagagaaataattttttacatcgttgaatatgtaaacaatttaattcaagaagctaggaatataaatattgaggagtttatgattattattattattttgatgttcaatgaagttttttttaatttcatatgaagtatacaaaaattcttcatagatttttgtttctatgccgtagttatctttaatatatttgtggttgaagaaatttattgctagaaacgaatggattgtcaatttttttttaaagcaaatatatatgaaattatactgtatattattttagtcatgattaaaatgtggccttaattgaatcatctttctcattcattttttcaaaagcatatcaggatgattgatatttatctattttaaaaattaatttaagggttcaaattaaatttaacttaaaagtgtcctaaccgtagttaaaggtttactttaaaaaaatactatgaaaaatctaatcttctatgaatcgagggcccttagctagttag

SEQ ID NO: 89 - DNA, 13151 bp, synthetic construct
  misc_feature 1..13151: note = pWISE3361 Full plasmid sequence
  source 1..13151: mol_type = other DNA
aagcttcgataaaaatgttttaaacgatatatattataaaaaaaaacgtttcaaaaataaatacaaaaatgtttttaaatatatataatttaactcattaaagaaaataaaaatgcaagtgcggtgacaagacaagctaaaagttgcaaaagaaatggcagggctataaggctcacctactcctggatttaccaaattttggttcgtccctatactcgaaaaataaaacaaaataaatttcagtatcttcgtttttgtatgctttgactgtgaggcgaggccaactttcttcttctgtctgagatgaattttgtttgcctcctgtgaaggatgtatcattcaaagtgaatgttttgcaactgccagtagtcccacatcgaccaaatattcttattacagtgtgtttatatagcacctggagaaggaatgggttgtttcaaagattaaataatttctactaagtgtagattgtgtgatgttcgatgttggatttaatttctactaagtgtagattttttttactagtgatatccgtcgactggtacctacgcgtagctagcccgtgaagtttctcatctaagcccccatttggacgtgaatgtagacacgtcgaaataaagatttccgaattagaataatttgtttattgctttcgcctataaatacgacggatcgtaatttgtcgttttatcaaaatgtactttcattttataataacgctgcggacatctacatttttgaattgaaaaaaaattggtaattactctttctttttctccatattgaccatcatactcattgctgatccatgtagatttcccggacatgaagccatttacaattgaatatatcctgccgccgctgccgctttgcacccggtggagcttgcatgttggtttctacgcagaactgagccggttaggcagataatttccattgagaactgagccatgtgcaccttccccccaacacggtgagcgacggggcaacggagtgatccacatgggacttttcctagcttggctgccatttttggggtgaggccgttcgcggccgaggggcgcagcccctggggggatgggaggcccgcgttagcgggccgggagggttcgagaagggggggcaccccccttcggcgtgcgcggtcacgcgcacagggcgcagccctggttaaaaacaaggtttataaatattggtttaaaagcaggttaaaagacaggttagcggtggccgaaaaacgggcggaaacccttgcaaatgctggattttctgcctgtggacagcccctcaaatgtcaataggtgcgcccctcatctgtcagcactctgcccctcaagtgtcaaggatcgcgcccctcatctgtcagtagtcgcgcccctcaagtgtcaataccgcagggcacttatccccaggcttgtccacatcatctgtgggaaactcgcgtaaaatcaggcgttttcgccgatttgcgaggctggccagctccacgtcgccggccgaaatcgagcctgcccctcatctgtcaacgccgcgccgggtgagtcggcccctcaagtgtcaacgtccgcccctcatctgtcagtgagggccaagttttccgcgaggtatccacaacgccggcggccggccgcggtgtctcgcacacggcttcgacggcgtttctggcgcgtttgcagggccatagacggccgccagcccagcggcgagggcaaccagcccggtgagcgtcggaaagggtcgatcgaccgatgcccttgagagccttcaacccagtcagctccttccggtgggcgcggggcatgactatcgtcgccgcacttatgactgtcttctttatcatgcaactcgtaggacaggtgccggcagcgctctgggtcattttcggcgaggaccgctttcgctggagcgcgacgatgatcggcctgtcgcttgcggtattcggaatcttgcacgccctcgctcaagccttcgtcactggtcccgccaccaaacgtttcggcgagaagcaggccattatcgccggcatggcggccgacgcgctgggctacgtcttgctggcgttcgcgacgcgaggctggatggccttccccattatgattcttctcgcttccggcggcatcgggatgcccgcgttgcaggccatgctgtccaggcaggtagatgacgaccatcagggacagcttcaaggatcgctcgcggctcttaccagcctaacttcgatcattggaccgctgatcgtcacggcgatttatgccgcctcggcgagcacatggaacgggttggcatggattgtaggcgccgccctataccttgtctgcctccccgcgttgcgtcgcggtgcatggagccgggccacctcgacctgaatggaagccggcggcacctcgctaacggattcaccactccaagaattggagccaatcaattcttgcggagaactgtgaatgcgcaaaccaacccttggcagaacatatccatcgcgtccgccatctccagcagccgcacgcggcgcatctcgggcagcgttgggtcctggccacgggtgcgcatgatcgtgctcctgtcgttgaggacccggctaggctggcggggttgccttactggttagcagaatgaatcaccgatacgcgagcgaacgtgaagcgactgctgctgcaaaacgtctgcgacctgagcaacaacatgaatggtcttcggtttccgtgtttcgtaaagtctggaaacgcggaagtcagcgccctgcaccattatgttccggatctgcatcgcaggatgctgctggctaccctgtggaacacctacatctgtattaacgaagcgctggcattgaccctgagtgatttttctctggtcccgccgcatccataccgccagttgtttaccctcacaacgttccagtaaccgggcatgttcatcatcagtaacccgtatcgtgagcatcctctctcgtttcatcggtatcattacccccatgaacagaaatcccccttacacggaggcatcagtgaccaaacaggaaaaaaccgcccttaacatggcccgctttatcagaagccagacattaacgcttctggagaaactcaacgagctggacgcggatgaacaggcagacatctgtgaatcgcttcacgaccacgctgatgagctttaccgcagctgcctcgcgcgtttcggtgatgacggtgaaaacctctgacacatgcagctcccggagacggtcacagcttgtctgtaagcggatgccgggagcagacaagcccgtcagggcgcgtcagcgggtgttggcgggtgtcggggcgcagccatgacccagtcacgtagcgatagcggagtgtatactggcttaactatgcggcatcagagcagattgtactgagagtgcaccatatgcggtgtgaaataccgcacagatgcgtaaggagaaaataccgcatcaggcgctcttccgcttcctcgctcactgactcgctgcgctcggtcgttcggctgcggcgagcggtatcagctcactcaaaggcggtaatacggttatccacagaatcaggggataacgcaggaaagaacatgtgagcaaaaggccagcaaaaggccaggaaccgtaaaaaggccgcgttgctggcgtttttccataggctccgcccccctgacgagcatcacaaaaatcgacgctcaagtcagaggtggcgaaacccgacaggactataaagataccaggcgtttccccctggaagctccctcgtgcgctctcctgttccgaccctgccgcttaccggatacctgtccgcctttctcccttcgggaagcgtggcgctttctcatagctcacgctgtaggtatctcagttcggtgtaggtcgttcgctccaagctgggctgtgtgcacgaaccccccgttcagcccgaccgctgcgccttatccggtaactatcgtcttgagtccaacccggtaagacacgacttatcgccactggcagcagccactggtaacaggattagcagagcgaggtatgtaggcggtgctacagagttcttgaagtggtggcctaactacggctacactagaaggacagtatttggtatctgcgctctgctgaagccagttaccttcggaaaaagagttggtagctcttgatccggcaaacaaaccaccgctggtagcggtggtttttttgtttgcaagcagcagattacgcgcagaaaaaaaggatctcaagaagatcctttgatcttttctacggggtctgacgctcagtggaacgaaaactcacgttaagggattttggtcatgagattatcaaaaaggatcttcacctagatccttttaaattaaaaatgaagttttaaatcaatctaaagtatatatgagtaaacttggtctgacagttaccaatgcttaatcagtgaggcacctatctcagcgatctgtctatttcgttcatccatagttgcctgactccccgtcgtgtagataactacgatacgggagggcttaccatctggccccagtgctgcaatgataccgcgagacccacgctcaccggctccagatttatcagcaataaaccagccagccggaagggccgagcgcagaagtggtcctgcaactttatccgcctccatccagtctattaattgttgccgggaagctagagtaagtagttcgccagttaatagtttgcgcaacgttgttgccattgctgcaggtcgggagcacaggatgacgcctaacaattcattcaagccgacaccgcttcgcggcgcggcttaattcaggagttaaacatcatgagtattcaacatttccgtgtcgcccttattcccttttttgcggcattttgccttcctgtttttgctcacccagaaacgctggtgaaagtaaaagatgctgaagatcagttgggtgcacgagtgggttacatcgaactggatctcaacagcggtaagatccttgagagttttcgccccgaagaacgttttccaatgatgagcacttttaaagttctgctatgtggcgcggtattatcccgtattgacgccgggcaagagcaactcggtcgccgcatacactattctcagaatgacttggttgagtactcaccagtcacagaaaagcatcttacggatggcatgacagtaagagaattatgcagtgctgccataaccatgagtgataacactgcggccaacttacttctgacaacgatcggaggaccgaaggagctaaccgcttttttgcacaacatgggggatcatgtaactcgccttgatcgttgggaaccggagctgaatgaagccataccaaacgacgagcgtgacaccacgatgcctgtagcaatggcaacaacgttgcgcaaactattaactggcgaactacttactctagcttcccggcaacaattaatagactggatggaggcggataaagttgcaggaccacttctgcgctcggcccttccggctggctggtttattgctgataaatctggagccggtgagcgtggttctcgcggtatcattgcagcactggggccagatggtaagccctcccgtatcgtagttatctacacgacggggagtcaggcaactatggatgaacgaaatagacagatcgctgagataggtgcctcactgattaagcattggtaatgtctaacaattcgttcaagccgacgccgcttcgcggcgcggcttaactcaagcgttagatgctgcaggcatcgtggtgtcacgctcgtcgtttggtatggcttcattcagctccggttcccaacgatcaaggcgagttacatgatcccccatgttgtgcaaaaaagcggttagctccttcggtcctccgatcgaggatttttcggcgctgcgctacgtccgcgaccgcgttgagggatcaagccacagcagcccactcgaccttctagccgacccagacgagccaagggatctttttggaatgctgctccgtcgtcaggctttccgacgtttgggtggttgaacagaagtcattatcgcacggaatgccaagcactcccgaggggaaccctgtggttggcatgcacatacaaatggacgaacggataaaccttttcacgcccttttaaatatccgattattctaataaacgctcttttctcttaggtttacccgccaatatatcctgtcaaacactgatagtttaaactgaaggcgggaaacgacaatctcctaggttaggattttttttcacgaaattgcttcttgaaattacgtgatggattttgattctgatttatcttgtgattgttgactctacagatgcagatcttcgtcaagaccctcaccggaaagaccatcacccttgaggtggaaagctctgacaccatcgacaacgtcaaggccaagatccaggacaaggaaggaattcccccggatcagcaacgtctcatcttcgccggaaagcagctcgaggacggccgtaccctcgccgactacaacatccagaaggagtcaacccttcaccttgtccttcgtctccgtggtggcatgcagatcttcgtcaagactctcactggcaaaaccataaccctagaggtcgaaagctctgacaccattgacaacgtcaaggccaagatccaggacaaggagggaatccccccagaccagcaacgtctcatcttcgccggaaagcaacttgaggacgggcgcaccctcgccgactacaacatccagaaggaatcaacccttcacctcgtcctccgtctccgtggtggcatgcagatcttcgttaagaccctcaccggcaagactataaccctagaagtcgagagctccgacaccatcgacaacgtcaaggctaagatccaggacaaggagggtatccccccagaccagcagaggctgatcttcgccggcaagcagctcgaggacggacgtacccttgctgactacaacatccagaaggagtcaactctccacttggtgttgcgtcttcgtggtggtatgcagatcttcgtcaagacccttacgggtaagactattaccctcgaggtggagagctccgacaccattgacaatgtgaaggcgaagatccaggacaaggaaggaatcccaccggaccagcagaggcttatttttgctggcaaacagctagaggatggaaggaccctcgctgactacaacatccagaaggagtcaactctgcacttggtgttgcgtcttcgtggggggttttcaaatgctgctgatgaagtggcaactcaattactgaattttgacctcttgaagcttgccggtgatgttgagtctaaccctggaccaatggcgcaagttagcagaatctgcaatggtgtgcagaacccatctcttatctccaatctctcgaaatccagtcaacgcaaatctcccttatcggtttctctgaagacgcagcagcatccacgagcttatccgatttcgtcgtcgtggggattgaagaagagtgggatgacgttaattggctctgagcttcgtcctcttaaggtcatgtcttctgtttccacggcgtgcatgggggaagcggtgatcgccgaagtatcgactcaactatcagaggtagttggcgtcatcgagcgccatctcgaaccgacgttgctggccgtacatttgtacggctccgcagtggatggcggcctgaagccacacagtgatattgatttgctggttacggtgaccgtaaggcttgatgaaacaacgcggcgagctttgatcaacgaccttttggaaacttcggcttcccctggagagagcgagattctccgcgctgtagaagtcaccattgttgtgcacgacgacatcattccgtggcgttatccagctaagcgcgaactgcaatttggagaatggcagcgcaatgacattcttgcaggtatcttcgagccagccacgatcgacattgatctggctatcttgctgacaaaagcaagagaacatagcgttgccttggtaggtccagcggcggaggaactctttgatccggttcctgaacaggatctatttgaggcgctaaatgaaaccttaacgctatggaactcgccgcccgactgggctggcgatgagcgaaatgtagtgcttacgttgtcccgcatttggtacagcgcagtaaccggcaaaatcgcgccgaaggatgtcgctgccgactgggcaatggagcgcctgccggcccagtatcagcccgtcatacttgaagctagacaggcttatcttggacaagaagaagatcgcttggcctcgcgcgcagatcagttggaagaatttgtccactacgtgaaaggcgagatcaccaaggtagtcggcaaataagctggagctgatgtctgtgtgatgtctgatgttggattttcccagacattttaagaagaaatgtgatgtgtaatgggtctgtaatgacctttgaaaataagtttggtttgtgttgaactctattgtcccattaatgttactactgtttgttatcaatttgtggagctgatatataattatcaactgtatgctggcatattgtgtttgaattttgttctcaatccagtgaattggcgtatattagtgggttttttattcttcatgcttatcacggaggaaaagcagggatgagttgtgtgaaggatggtgatcatcccacgaattattagattttggtattataggttaaagatatttattaggtagggagaactcttggattagattctaaagtgatattttgaaaacacaccaaaggatttttgaacaaacggagatcatgatccctagtttcaattagctgccccttaccaagaggtagcaacttaaaaattatgctcgtgaagcatatttggtatcgtatataaattatgtaagcaatctgcttcagttggaacattaattggcttgcggaatgcacatttagatgatccacacaggtccacataaaaattcctaatcaattttagttatgcaatctttctgcttcaggtagtccttgtcttacagaaagcacattgagatgatccccacacagatccacataaaaaattcctaatcaataataacttgaaaatcattaaaagatgtaatgccatactaatccctaatttttgtgcaagtttttgtatactggaccccaaaaaataccaaaaagaaaaaacaagttattcagtgatatttttctgctccaatataaatttgattaccaaataccaaaaaataaaaacactattcagtggtatttttctgctccaatactggaccccaaattaatcagaatcggatccgtttaacagataaaaacaaaagcgatcgggttaaaatcccatttttacaaataacaacgcaggtttatacatgaaacaaatgtcattacctaggctggcagcacatcccccgttcgcgagctggcgtaacagcgaagaggcccgggcgcgcctagctaactagctagccacgtgactcgcagaacgttgtgtggcgagacggaaagaaagtcacgcctccaaagagtgcagcatctcttctggctctcacggtcctctgtggatccatcgatatcgaattcctgcaggctcgaggtcattcatatgcttgagaagagagtcgggatagtccaaaataaaacaaaggtaagattacctggtcaaaagtgaaaacatcagttaaaaggtggtataaagtaaaatatcggtaataaaaggtggcccaaagtgaaatttactcttttctactattataaaaattgaggatgtttttgtcggtactttgatacgtcatttttgtatgaattggtttttaagtttattcgcttttggaaatgcatatctgtatttgagtcgggttttaagttcgtttgcttttgtaaatacagagggatttgtataagaaatatctttagaaaaacccatatgctaatttgacataatttttgagaaaaatatatattcaggcgaattctcacaatgaacaataataagattaaaatagctttcccccgttgcagcgcatgggtattttttctagtaaaaataaaagataaacttagactcaaaacatttacaaaaacaacccctaaagttcctaaagcccaaagtgctatccacgatccatagcaagcccagcccaacccaacccaacccaacccaccccagtccagccaactggacaatagtctccacacccccccactatcaccgtgagttgtccgcacgcaccgcacgtctcgcagccaaaaaaaaaaagaaagaaaaaaaagaaaaagaaaaaacagcaggtgggtccgggtcgtgggggccggaaacgcgaggaggatcgcgagccagcgacgaggagcttaggcctcatcgttgaagatgcctctgccgacagtggtcccaaagatggacccccacccacgaggagcatcgtggaaaaagaagacgttccaaccacgtcttcaaagcaagtggattgatgtgatatctccactgacgtaagggatgacgcacaatcccactatccttcgaggcctcatcgttgaagatgcctctgccgacagtggtcccaaagatggacccccacccacgaggagcatcgtggaaaaagaagacgttccaaccacgtcttcaaagcaagtggattgatgtgatatctccactgacgtaagggatgacgcacaatcccactatccttcgaagctccctccctccgcttccaaagaaacgccccccatcgccactatatacatacccccccctctcctcccatccccccaacccttctagaaccatcttccacacactcaagccacactattggagaacacacagggacaacacaccataagatccaagggaggcctccgccgccgccggtaaccaccccgcccctctcctctttctttctccgtttttttttccgtctcggtctcgatctttggccttggtagtttgggtgggcgagaggcggcttcgtgcgcgcccagatcggtgcgcgggaggggcgggatctcgcggctggggctctcgccggcgtggatccggcccggatctcgcggggaatggggctctcggatgtagatctgcgatccgccgttgttgggggagatgatggggggtttaaaatttccgccgtgctaaacaagatcaggaagaggggaaaagggcactatggtttatatttttatatatttctgctgcttcgtcaggcttagatgtgctagatctttctttcttctttttgtgggtagaatttgaatccctcagcattgttcatcggtagtttttcttttcatgatttgtgacaaatgcagcctcgtgcggagcttttttgtaggtagaaggcggccgcatggcccagtctaagcacgggttgacgaaggagatgactatgaagtatcgcatggaaggctgcgttgacggccacaaattcgtcattaccggcgagggcatcggctacccctttaaggtaagtttctgcttctacctttgatatatatataataattatcattaattagtagtaatataatatttcaaatatttttttcaaaataaaagaatgtagtatatagcaattgcttttctgtagtttataagtgtgtatattttaatttataacttttctaatatatgaccaaaatttgttgatgtgcagggcaagcaagcgataaacctgtgcgtggtggagggtggccctctgcccttcgccgaggatatactctcagccgccttcatgtacgggaatcgggtgttcacggagtacccgcaagacatcgtggactacttcaagaactcctgccccgccggatacacatgggaccgttccttcctcttcgaggacggagccgtttgcatctgcaacgcggacatcaccgtgtccgtcgaggagaactgcatgtaccacgagtcaaagttctatggagtgaacttcccggccgatggtcccgtgatgaagaaaatgacggacaactgggagccgtcgtgcgagaaaatcattcccgtcccaaaacagggaatcctcaagggcgacgtgtcgatgtacctacttctcaaggacggtggacggctacggtgccagttcgacactgtttacaaggcgaagtcggtgccgaggaagatgccggactggcactttatccagcacaagctgacaagggaggacagaagcgacgctaagaaccagaaatggcacctcaccgagcacgccatcgccagtggctctgcgctgcccgggtgaccctgcaatgtgaccctagacttgtccatcttctggattggccaacttaattaatgtatgaaataaaaggatgcacacatagtgacatgctaatcactataatgtgggcatcaaagttgtgtgttatgtgtaattactaattatctgaataagagaaagagatcatccatatttcttatcctaaatgaatgtcacgtgtctttataattctttgatgaaccagatgcattttattaaccaattccatatacatataaatattaatcatatataattaatatcaattgggttagcaaaacaaatctagtctaggtgtgttttgctaattattgggggatagtgcaaaaagaaatctacgttctcaataattcagatagaaaacttaataaagtgagataatttacatagattgcttttatcctttgatatatgtgaaaccatgcatgatataaggaaaatagatagagaaataattttttacatcgttgaatatgtaaacaatttaattcaagaagctaggaatataaatattgaggagtttatgattattattattattttgatgttcaatgaagttttttttaatttcatatgaagtatacaaaaattcttcatagatttttgtttctatgccgtagttatctttaatatatttgtggttgaagaaatttattgctagaaacgaatggattgtcaatttttttttaaagcaaatatatatgaaattatactgtatattattttagtcatgattaaaatgtggccttaattgaatcatctttctcattcattttttcaaaagcatatcaggatgattgatatttatctattttaaaaattaatttaagggttcaaattaaatttaacttaaaagtgtcctaaccgtagttaaaggtttactttaaaaaaatactatgaaaaatctaatcttctatgaatcgagggcccttagctagttag

SEQ ID NO: 90 - DNA, 13151 bp, synthetic construct
  misc_feature 1..13151: note = pWISE3362 Full plasmid sequence
  source 1..13151: mol_type = other DNA
aagcttcgataaaaatgttttaaacgatatatattataaaaaaaaacgtttcaaaaataaatacaaaaatgtttttaaatatatataatttaactcattaaagaaaataaaaatgcaagtgcggtgacaagacaagctaaaagttgcaaaagaaatggcagggctataaggctcacctactcctggatttaccaaattttggttcgtccctatactcgaaaaataaaacaaaataaatttcagtatcttcgtttttgtatgctttgactgtgaggcgaggccaactttcttcttctgtctgagatgaattttgtttgcctcctgtgaaggatgtatcattcaaagtgaatgttttgcaactgccagtagtcccacatcgaccaaatattcttattacagtgtgtttatatagcacctggagaaggaatgggttgtttcaaagattaaataatttctactaagtgtagattgtgtgatgttcgatgttggatttaatttctactaagtgtagattttttttactagtgatatccgtcgactggtacctacgcgtagctagcccgtgaagtttctcatctaagcccccatttggacgtgaatgtagacacgtcgaaataaagatttccgaattagaataatttgtttattgctttcgcctataaatacgacggatcgtaatttgtcgttttatcaaaatgtactttcattttataataacgctgcggacatctacatttttgaattgaaaaaaaattggtaattactctttctttttctccatattgaccatcatactcattgctgatccatgtagatttcccggacatgaagccatttacaattgaatatatcctgccgccgctgccgctttgcacccggtggagcttgcatgttggtttctacgcagaactgagccggttaggcagataatttccattgagaactgagccatgtgcaccttccccccaacacggtgagcgacggggcaacggagtgatccacatgggacttttcctagcttggctgccatttttggggtgaggccgttcgcggccgaggggcgcagcccctggggggatgggaggcccgcgttagcgggccgggagggttcgagaagggggggcaccccccttcggcgtgcgcggtcacgcgcacagggcgcagccctggttaaaaacaaggtttataaatattggtttaaaagcaggttaaaagacaggttagcggtggccgaaaaacgggcggaaacccttgcaaatgctggattttctgcctgtggacagcccctcaaatgtcaataggtgcgcccctcatctgtcagcactctgcccctcaagtgtcaaggatcgcgcccctcatctgtcagtagtcgcgcccctcaagtgtcaataccgcagggcacttatccccaggcttgtccacatcatctgtgggaaactcgcgtaaaatcaggcgttttcgccgatttgcgaggctggccagctccacgtcgccggccgaaatcgagcctgcccctcatctgtcaacgccgcgccgggtgagtcggcccctcaagtgtcaacgtccgcccctcatctgtcagtgagggccaagttttccgcgaggtatccacaacgccggcggccggccgcggtgtctcgcacacggcttcgacggcgtttctggcgcgtttgcagggccatagacggccgccagcccagcggcgagggcaaccagcccggtgagcgtcggaaagggtcgatcgaccgatgcccttgagagccttcaacccagtcagctccttccggtgggcgcggggcatgactatcgtcgccgcacttatgactgtcttctttatcatgcaactcgtaggacaggtgccggcagcgctctgggtcattttcggcgaggaccgctttcgctggagcgcgacgatgatcggcctgtcgcttgcggtattcggaatcttgcacgccctcgctcaagccttcgtcactggtcccgccaccaaacgtttcggcgagaagcaggccattatcgccggcatggcggccgacgcgctgggctacgtcttgctggcgttcgcgacgcgaggctggatggccttccccattatgattcttctcgcttccggcggcatcgggatgcccgcgttgcaggccatgctgtccaggcaggtagatgacgaccatcagggacagcttcaaggatcgctcgcggctcttaccagcctaacttcgatcattggaccgctgatcgtcacggcgatttatgccgcctcggcgagcacatggaacgggttggcatggattgtaggcgccgccctataccttgtctgcctccccgcgttgcgtcgcggtgcatggagccgggccacctcgacctgaatggaagccggcggcacctcgctaacggattcaccactccaagaattggagccaatcaattcttgcggagaactgtgaatgcgcaaaccaacccttggcagaacatatccatcgcgtccgccatctccagcagccgcacgcggcgcatctcgggcagcgttgggtcctggccacgggtgcgcatgatcgtgctcctgtcgttgaggacccggctaggctggcggggttgccttactggttagcagaatgaatcaccgatacgcgagcgaacgtgaagcgactgctgctgcaaaacgtctgcgacctgagcaacaacatgaatggtcttcggtttccgtgtttcgtaaagtctggaaacgcggaagtcagcgccctgcaccattatgttccggatctgcatcgcaggatgctgctggctaccctgtggaacacctacatctgtattaacgaagcgctggcattgaccctgagtgatttttctctggtcccgccgcatccataccgccagttgtttaccctcacaacgttccagtaaccgggcatgttcatcatcagtaacccgtatcgtgagcatcctctctcgtttcatcggtatcattacccccatgaacagaaatcccccttacacggaggcatcagtgaccaaacaggaaaaaaccgcccttaacatggcccgctttatcagaagccagacattaacgcttctggagaaactcaacgagctggacgcggatgaacaggcagacatctgtgaatcgcttcacgaccacgctgatgagctttaccgcagctgcctcgcgcgtttcggtgatgacggtgaaaacctctgacacatgcagctcccggagacggtcacagcttgtctgtaagcggatgccgggagcagacaagcccgtcagggcgcgtcagcgggtgttggcgggtgtcggggcgcagccatgacccagtcacgtagcgatagcggagtgtatactggcttaactatgcggcatcagagcagattgtactgagagtgcaccatatgcggtgtgaaataccgcacagatgcgtaaggagaaaataccgcatcaggcgctcttccgcttcctcgctcactgactcgctgcgctcggtcgttcggctgcggcgagcggtatcagctcactcaaaggcggtaatacggttatccacagaatcaggggataacgcaggaaagaacatgtgagcaaaaggccagcaaaaggccaggaaccgtaaaaaggccgcgttgctggcgtttttccataggctccgcccccctgacgagcatcacaaaaatcgacgctcaagtcagaggtggcgaaacccgacaggactataaagataccaggcgtttccccctggaagctccctcgtgcgctctcctgttccgaccctgccgcttaccggatacctgtccgcctttctcccttcgggaagcgtggcgctttctcatagctcacgctgtaggtatctcagttcggtgtaggtcgttcgctccaagctgggctgtgtgcacgaaccccccgttcagcccgaccgctgcgccttatccggtaactatcgtcttgagtccaacccggtaagacacgacttatcgccactggcagcagccactggtaacaggattagcagagcgaggtatgtaggcggtgctacagagttcttgaagtggtggcctaactacggctacactagaaggacagtatttggtatctgcgctctgctgaagccagttaccttcggaaaaagagttggtagctcttgatccggcaaacaaaccaccgctggtagcggtggtttttttgtttgcaagcagcagattacgcgcagaaaaaaaggatctcaagaagatcctttgatcttttctacggggtctgacgctcagtggaacgaaaactcacgttaagggattttggtcatgagattatcaaaaaggatcttcacctagatccttttaaattaaaaatgaagttttaaatcaatctaaagtatatatgagtaaacttggtctgacagttaccaatgcttaatcagtgaggcacctatctcagcgatctgtctatttcgttcatccatagttgcctgactccccgtcgtgtagataactacgatacgggagggcttaccatctggccccagtgctgcaatgataccgcgagacccacgctcaccggctccagatttatcagcaataaaccagccagccggaagggccgagcgcagaagtggtcctgcaactttatccgcctccatccagtctattaattgttgccgggaagctagagtaagtagttcgccagttaatagtttgcgcaacgttgttgccattgctgcaggtcgggagcacaggatgacgcctaacaattcattcaagccgacaccgcttcgcggcgcggcttaattcaggagttaaacatcatgagtattcaacatttccgtgtcgcccttattcccttttttgcggcattttgccttcctgtttttgctcacccagaaacgctggtgaaagtaaaagatgctgaagatcagttgggtgcacgagtgggttacatcgaactggatctcaacagcggtaagatccttgagagttttcgccccgaagaacgttttccaatgatgagcacttttaaagttctgctatgtggcgcggtattatcccgtattgacgccgggcaagagcaactcggtcgccgcatacactattctcagaatgacttggttgagtactcaccagtcacagaaaagcatcttacggatggcatgacagtaagagaattatgcagtgctgccataaccatgagtgataacactgcggccaacttacttctgacaacgatcggaggaccgaaggagctaaccgcttttttgcacaacatgggggatcatgtaactcgccttgatcgttgggaaccggagctgaatgaagccataccaaacgacgagcgtgacaccacgatgcctgtagcaatggcaacaacgttgcgcaaactattaactggcgaactacttactctagcttcccggcaacaattaatagactggatggaggcggataaagttgcaggaccacttctgcgctcggcccttccggctggctggtttattgctgataaatctggagccggtgagcgtggttctcgcggtatcattgcagcactggggccagatggtaagccctcccgtatcgtagttatctacacgacggggagtcaggcaactatggatgaacgaaatagacagatcgctgagataggtgcctcactgattaagcattggtaatgtctaacaattcgttcaagccgacgccgcttcgcggcgcggcttaactcaagcgttagatgctgcaggcatcgtggtgtcacgctcgtcgtttggtatggcttcattcagctccggttcccaacgatcaaggcgagttacatgatcccccatgttgtgcaaaaaagcggttagctccttcggtcctccgatcgaggatttttcggcgctgcgctacgtccgcgaccgcgttgagggatcaagccacagcagcccactcgaccttctagccgacccagacgagccaagggatctttttggaatgctgctccgtcgtcaggctttccgacgtttgggtggttgaacagaagtcattatcgcacggaatgccaagcactcccgaggggaaccctgtggttggcatgcacatacaaatggacgaacggataaaccttttcacgcccttttaaatatccgattattctaataaacgctcttttctcttaggtttacccgccaatatatcctgtcaaacactgatagtttaaactgaaggcgggaaacgacaatctcctaggtaatgacatttgtttcatgtataaacctgcgttgttatttgtaaaaatgggattttaacccgatcgcttttgtttttatctgttaaacggatccgattctgattaatttggggtccagtattggagcagaaaaataccactgaatagtgtttttattttttggtatttggtaatcaaatttatattggagcagaaaaatatcactgaataacttgttttttctttttggtattttttggggtccagtatacaaaaacttgcacaaaaattagggattagtatggcattacatcttttaatgattttcaagttattattgattaggaattttttatgtggatctgtgtggggatcatctcaatgtgctttctgtaagacaaggactacctgaagcagaaagattgcataactaaaattgattaggaatttttatgtggacctgtgtggatcatctaaatgtgcattccgcaagccaattaatgttccaactgaagcagattgcttacataatttatatacgataccaaatatgcttcacgagcataatttttaagttgctacctcttggtaaggggcagctaattgaaactagggatcatgatctccgtttgttcaaaaatcctttggtgtgttttcaaaatatcactttagaatctaatccaagagttctccctacctaataaatatctttaacctataataccaaaatctaataattcgtgggatgatcaccatccttcacacaactcatccctgcttttcctccgtgataagcatgaagaataaaaaacccactaatatacgccaattcactggattgagaacaaaattcaaacacaatatgccagcatacagttgataattatatatcagctccacaaattgataacaaacagtagtaacattaatgggacaatagagttcaacacaaaccaaacttattttcaaaggtcattacagacccattacacatcacatttcttcttaaaatgtctgggaaaatccaacatcagacatcacacagacatcagctccagcttatttgccgactaccttggtgatctcgcctttcacgtagtggacaaattcttccaactgatctgcgcgcgaggccaagcgatcttcttcttgtccaagataagcctgtctagcttcaagtatgacgggctgatactgggccggcaggcgctccattgcccagtcggcagcgacatccttcggcgcgattttgccggttactgcgctgtaccaaatgcgggacaacgtaagcactacatttcgctcatcgccagcccagtcgggcggcgagttccatagcgttaaggtttcatttagcgcctcaaatagatcctgttcaggaaccggatcaaagagttcctccgccgctggacctaccaaggcaacgctatgttctcttgcttttgtcagcaagatagccagatcaatgtcgatcgtggctggctcgaagatacctgcaagaatgtcattgcgctgccattctccaaattgcagttcgcgcttagctggataacgccacggaatgatgtcgtcgtgcacaacaatggtgacttctacagcgcggagaatctcgctctctccaggggaagccgaagtttccaaaaggtcgttgatcaaagctcgccgcgttgtttcatcaagccttacggtcaccgtaaccagcaaatcaatatcactgtgtggcttcaggccgccatccactgcggagccgtacaaatgtacggccagcaacgtcggttcgagatggcgctcgatgacgccaactacctctgatagttgagtcgatacttcggcgatcaccgcttcccccatgcacgccgtggaaacagaagacatgaccttaagaggacgaagctcagagccaattaacgtcatcccactcttcttcaatccccacgacgacgaaatcggataagctcgtggatgctgctgcgtcttcagagaaaccgataagggagatttgcgttgactggatttcgagagattggagataagagatgggttctgcacaccattgcagattctgctaacttgcgccattggtccagggttagactcaacatcaccggcaagcttcaagaggtcaaaattcagtaattgagttgccacttcatcagcagcatttgaaaaccccccacgaagacgcaacaccaagtgcagagttgactccttctggatgttgtagtcagcgagggtccttccatcctctagctgtttgccagcaaaaataagcctctgctggtccggtgggattccttccttgtcctggatcttcgccttcacattgtcaatggtgtcggagctctccacctcgagggtaatagtcttacccgtaagggtcttgacgaagatctgcataccaccacgaagacgcaacaccaagtggagagttgactccttctggatgttgtagtcagcaagggtacgtccgtcctcgagctgcttgccggcgaagatcagcctctgctggtctggggggataccctccttgtcctggatcttagccttgacgttgtcgatggtgtcggagctctcgacttctagggttatagtcttgccggtgagggtcttaacgaagatctgcatgccaccacggagacggaggacgaggtgaagggttgattccttctggatgttgtagtcggcgagggtgcgcccgtcctcaagttgctttccggcgaagatgagacgttgctggtctggggggattccctccttgtcctggatcttggccttgacgttgtcaatggtgtcagagctttcgacctctagggttatggttttgccagtgagagtcttgacgaagatctgcatgccaccacggagacgaaggacaaggtgaagggttgactccttctggatgttgtagtcggcgagggtacggccgtcctcgagctgctttccggcgaagatgagacgttgctgatccgggggaattccttccttgtcctggatcttggccttgacgttgtcgatggtgtcagagctttccacctcaagggtgatggtctttccggtgagggtcttgacgaagatctgcatctgtagagtcaacaatcacaagataaatcagaatcaaaatccatcacgtaatttcaagaagcaatttcgtgaaaaaaaatcctaacctaggctggcagcacatcccccgttcgcgagctggcgtaacagcgaagaggcccgggcgcgcctagctaactagctagccacgtgactcgcagaacgttgtgtggcgagacggaaagaaagtcacgcctccaaagagtgcagcatctcttctggctctcacggtcctctgtggatccatcgatatcgaattcctgcaggctcgaggtcattcatatgcttgagaagagagtcgggatagtccaaaataaaacaaaggtaagattacctggtcaaaagtgaaaacatcagttaaaaggtggtataaagtaaaatatcggtaataaaaggtggcccaaagtgaaatttactcttttctactattataaaaattgaggatgtttttgtcggtactttgatacgtcatttttgtatgaattggtttttaagtttattcgcttttggaaatgcatatctgtatttgagtcgggttttaagttcgtttgcttttgtaaatacagagggatttgtataagaaatatctttagaaaaacccatatgctaatttgacataatttttgagaaaaatatatattcaggcgaattctcacaatgaacaataataagattaaaatagctttcccccgttgcagcgcatgggtattttttctagtaaaaataaaagataaacttagactcaaaacatttacaaaaacaacccctaaagttcctaaagcccaaagtgctatccacgatccatagcaagcccagcccaacccaacccaacccaacccaccccagtccagccaactggacaatagtctccacacccccccactatcaccgtgagttgtccgcacgcaccgcacgtctcgcagccaaaaaaaaaaagaaagaaaaaaaagaaaaagaaaaaacagcaggtgggtccgggtcgtgggggccggaaacgcgaggaggatcgcgagccagcgacgaggagcttaggcctcatcgttgaagatgcctctgccgacagtggtcccaaagatggacccccacccacgaggagcatcgtggaaaaagaagacgttccaaccacgtcttcaaagcaagtggattgatgtgatatctccactgacgtaagggatgacgcacaatcccactatccttcgaggcctcatcgttgaagatgcctctgccgacagtggtcccaaagatggacccccacccacgaggagcatcgtggaaaaagaagacgttccaaccacgtcttcaaagcaagtggattgatgtgatatctccactgacgtaagggatgacgcacaatcccactatccttcgaagctccctccctccgcttccaaagaaacgccccccatcgccactatatacatacccccccctctcctcccatccccccaacccttctagaaccatcttccacacactcaagccacactattggagaacacacagggacaacacaccataagatccaagggaggcctccgccgccgccggtaaccaccccgcccctctcctctttctttctccgtttttttttccgtctcggtctcgatctttggccttggtagtttgggtgggcgagaggcggcttcgtgcgcgcccagatcggtgcgcgggaggggcgggatctcgcggctggggctctcgccggcgtggatccggcccggatctcgcggggaatggggctctcggatgtagatctgcgatccgccgttgttgggggagatgatggggggtttaaaatttccgccgtgctaaacaagatcaggaagaggggaaaagggcactatggtttatatttttatatatttctgctgcttcgtcaggcttagatgtgctagatctttctttcttctttttgtgggtagaatttgaatccctcagcattgttcatcggtagtttttcttttcatgatttgtgacaaatgcagcctcgtgcggagcttttttgtaggtagaaggcggccgcatggcccagtctaagcacgggttgacgaaggagatgactatgaagtatcgcatggaaggctgcgttgacggccacaaattcgtcattaccggcgagggcatcggctacccctttaaggtaagtttctgcttctacctttgatatatatataataattatcattaattagtagtaatataatatttcaaatatttttttcaaaataaaagaatgtagtatatagcaattgcttttctgtagtttataagtgtgtatattttaatttataacttttctaatatatgaccaaaatttgttgatgtgcagggcaagcaagcgataaacctgtgcgtggtggagggtggccctctgcccttcgccgaggatatactctcagccgccttcatgtacgggaatcgggtgttcacggagtacccgcaagacatcgtggactacttcaagaactcctgccccgccggatacacatgggaccgttccttcctcttcgaggacggagccgtttgcatctgcaacgcggacatcaccgtgtccgtcgaggagaactgcatgtaccacgagtcaaagttctatggagtgaacttcccggccgatggtcccgtgatgaagaaaatgacggacaactgggagccgtcgtgcgagaaaatcattcccgtcccaaaacagggaatcctcaagggcgacgtgtcgatgtacctacttctcaaggacggtggacggctacggtgccagttcgacactgtttacaaggcgaagtcggtgccgaggaagatgccggactggcactttatccagcacaagctgacaagggaggacagaagcgacgctaagaaccagaaatggcacctcaccgagcacgccatcgccagtggctctgcgctgcccgggtgaccctgcaatgtgaccctagacttgtccatcttctggattggccaacttaattaatgtatgaaataaaaggatgcacacatagtgacatgctaatcactataatgtgggcatcaaagttgtgtgttatgtgtaattactaattatctgaataagagaaagagatcatccatatttcttatcctaaatgaatgtcacgtgtctttataattctttgatgaaccagatgcattttattaaccaattccatatacatataaatattaatcatatataattaatatcaattgggttagcaaaacaaatctagtctaggtgtgttttgctaattattgggggatagtgcaaaaagaaatctacgttctcaataattcagatagaaaacttaataaagtgagataatttacatagattgcttttatcctttgatatatgtgaaaccatgcatgatataaggaaaatagatagagaaataattttttacatcgttgaatatgtaaacaatttaattcaagaagctaggaatataaatattgaggagtttatgattattattattattttgatgttcaatgaagttttttttaatttcatatgaagtatacaaaaattcttcatagatttttgtttctatgccgtagttatctttaatatatttgtggttgaagaaatttattgctagaaacgaatggattgtcaatttttttttaaagcaaatatatatgaaattatactgtatattattttagtcatgattaaaatgtggccttaattgaatcatctttctcattcattttttcaaaagcatatcaggatgattgatatttatctattttaaaaattaatttaagggttcaaattaaatttaacttaaaagtgtcctaaccgtagttaaaggtttactttaaaaaaatactatgaaaaatctaatcttctatgaatcgagggcccttagctagttag

SEQ ID NO: 91 - DNA, 19084 bp, synthetic construct
  misc_feature 1..19084: note = pWISE3587 Full plasmid sequence
  source 1..19084: mol_type = other DNA
aagcttcgataaaaatgttttaaacgatatatattataaaaaaaaacgtttcaaaaataaatacaaaaatgtttttaaatatatataatttaactcattaaagaaaataaaaatgcaagtgcggtgacaagacaagctaaaagttgcaaaagaaatggcagggctataaggctcacctactcctggatttaccaaattttggttcgtccctatactcgaaaaataaaacaaaataaatttcagtatcttcgtttttgtatgctttgactgtgaggcgaggccaactttcttcttctgtctgagatgaattttgtttgcctcctgtgaaggatgtatcattcaaagtgaatgttttgcaactgccagtagtcccacatcgaccaaatattcttattacagtgtgtttatatagcacctggagaaggaatgggttgtttcaaagattaaataatttctactaagtgtagatttgtaaccaacatcccctgatgataatttctactaagtgtagattttttttactagtgatatccgtcgactggtacctacgcgtagctagcccgtgaagtttctcatctaagcccccatttggacgtgaatgtagacacgtcgaaataaagatttccgaattagaataatttgtttattgctttcgcctataaatacgacggatcgtaatttgtcgttttatcaaaatgtactttcattttataataacgctgcggacatctacatttttgaattgaaaaaaaattggtaattactctttctttttctccatattgaccatcatactcattgctgatccatgtagatttcccggacatgaagccatttacaattgaatatatcctgccgccgctgccgctttgcacccggtggagcttgcatgttggtttctacgcagaactgagccggttaggcagataatttccattgagaactgagccatgtgcaccttccccccaacacggtgagcgacggggcaacggagtgatccacatgggacttttcctagcttggctgccatttttggggtgaggccgttcgcggccgaggggcgcagcccctggggggatgggaggcccgcgttagcgggccgggagggttcgagaagggggggcaccccccttcggcgtgcgcggtcacgcgcacagggcgcagccctggttaaaaacaaggtttataaatattggtttaaaagcaggttaaaagacaggttagcggtggccgaaaaacgggcggaaacccttgcaaatgctggattttctgcctgtggacagcccctcaaatgtcaataggtgcgcccctcatctgtcagcactctgcccctcaagtgtcaaggatcgcgcccctcatctgtcagtagtcgcgcccctcaagtgtcaataccgcagggcacttatccccaggcttgtccacatcatctgtgggaaactcgcgtaaaatcaggcgttttcgccgatttgcgaggctggccagctccacgtcgccggccgaaatcgagcctgcccctcatctgtcaacgccgcgccgggtgagtcggcccctcaagtgtcaacgtccgcccctcatctgtcagtgagggccaagttttccgcgaggtatccacaacgccggcggccggccgcggtgtctcgcacacggcttcgacggcgtttctggcgcgtttgcagggccatagacggccgccagcccagcggcgagggcaaccagcccggtgagcgtcggaaagggtcgatcgaccgatgcccttgagagccttcaacccagtcagctccttccggtgggcgcggggcatgactatcgtcgccgcacttatgactgtcttctttatcatgcaactcgtaggacaggtgccggcagcgctctgggtcattttcggcgaggaccgctttcgctggagcgcgacgatgatcggcctgtcgcttgcggtattcggaatcttgcacgccctcgctcaagccttcgtcactggtcccgccaccaaacgtttcggcgagaagcaggccattatcgccggcatggcggccgacgcgctgggctacgtcttgctggcgttcgcgacgcgaggctggatggccttccccattatgattcttctcgcttccggcggcatcgggatgcccgcgttgcaggccatgctgtccaggcaggtagatgacgaccatcagggacagcttcaaggatcgctcgcggctcttaccagcctaacttcgatcattggaccgctgatcgtcacggcgatttatgccgcctcggcgagcacatggaacgggttggcatggattgtaggcgccgccctataccttgtctgcctccccgcgttgcgtcgcggtgcatggagccgggccacctcgacctgaatggaagccggcggcacctcgctaacggattcaccactccaagaattggagccaatcaattcttgcggagaactgtgaatgcgcaaaccaacccttggcagaacatatccatcgcgtccgccatctccagcagccgcacgcggcgcatctcgggcagcgttgggtcctggccacgggtgcgcatgatcgtgctcctgtcgttgaggacccggctaggctggcggggttgccttactggttagcagaatgaatcaccgatacgcgagcgaacgtgaagcgactgctgctgcaaaacgtctgcgacctgagcaacaacatgaatggtcttcggtttccgtgtttcgtaaagtctggaaacgcggaagtcagcgccctgcaccattatgttccggatctgcatcgcaggatgctgctggctaccctgtggaacacctacatctgtattaacgaagcgctggcattgaccctgagtgatttttctctggtcccgccgcatccataccgccagttgtttaccctcacaacgttccagtaaccgggcatgttcatcatcagtaacccgtatcgtgagcatcctctctcgtttcatcggtatcattacccccatgaacagaaatcccccttacacggaggcatcagtgaccaaacaggaaaaaaccgcccttaacatggcccgctttatcagaagccagacattaacgcttctggagaaactcaacgagctggacgcggatgaacaggcagacatctgtgaatcgcttcacgaccacgctgatgagctttaccgcagctgcctcgcgcgtttcggtgatgacggtgaaaacctctgacacatgcagctcccggagacggtcacagcttgtctgtaagcggatgccgggagcagacaagcccgtcagggcgcgtcagcgggtgttggcgggtgtcggggcgcagccatgacccagtcacgtagcgatagcggagtgtatactggcttaactatgcggcatcagagcagattgtactgagagtgcaccatatgcggtgtgaaataccgcacagatgcgtaaggagaaaataccgcatcaggcgctcttccgcttcctcgctcactgactcgctgcgctcggtcgttcggctgcggcgagcggtatcagctcactcaaaggcggtaatacggttatccacagaatcaggggataacgcaggaaagaacatgtgagcaaaaggccagcaaaaggccaggaaccgtaaaaaggccgcgttgctggcgtttttccataggctccgcccccctgacgagcatcacaaaaatcgacgctcaagtcagaggtggcgaaacccgacaggactataaagataccaggcgtttccccctggaagctccctcgtgcgctctcctgttccgaccctgccgcttaccggatacctgtccgcctttctcccttcgggaagcgtggcgctttctcatagctcacgctgtaggtatctcagttcggtgtaggtcgttcgctccaagctgggctgtgtgcacgaaccccccgttcagcccgaccgctgcgccttatccggtaactatcgtcttgagtccaacccggtaagacacgacttatcgccactggcagcagccactggtaacaggattagcagagcgaggtatgtaggcggtgctacagagttcttgaagtggtggcctaactacggctacactagaaggacagtatttggtatctgcgctctgctgaagccagttaccttcggaaaaagagttggtagctcttgatccggcaaacaaaccaccgctggtagcggtggtttttttgtttgcaagcagcagattacgcgcagaaaaaaaggatctcaagaagatcctttgatcttttctacggggtctgacgctcagtggaacgaaaactcacgttaagggattttggtcatgagattatcaaaaaggatcttcacctagatccttttaaattaaaaatgaagttttaaatcaatctaaagtatatatgagtaaacttggtctgacagttaccaatgcttaatcagtgaggcacctatctcagcgatctgtctatttcgttcatccatagttgcctgactccccgtcgtgtagataactacgatacgggagggcttaccatctggccccagtgctgcaatgataccgcgagacccacgctcaccggctccagatttatcagcaataaaccagccagccggaagggccgagcgcagaagtggtcctgcaactttatccgcctccatccagtctattaattgttgccgggaagctagagtaagtagttcgccagttaatagtttgcgcaacgttgttgccattgctgcaggtcgggagcacaggatgacgcctaacaattcattcaagccgacaccgcttcgcggcgcggcttaattcaggagttaaacatcatgagtattcaacatttccgtgtcgcccttattcccttttttgcggcattttgccttcctgtttttgctcacccagaaacgctggtgaaagtaaaagatgctgaagatcagttgggtgcacgagtgggttacatcgaactggatctcaacagcggtaagatccttgagagttttcgccccgaagaacgttttccaatgatgagcacttttaaagttctgctatgtggcgcggtattatcccgtattgacgccgggcaagagcaactcggtcgccgcatacactattctcagaatgacttggttgagtactcaccagtcacagaaaagcatcttacggatggcatgacagtaagagaattatgcagtgctgccataaccatgagtgataacactgcggccaacttacttctgacaacgatcggaggaccgaaggagctaaccgcttttttgcacaacatgggggatcatgtaactcgccttgatcgttgggaaccggagctgaatgaagccataccaaacgacgagcgtgacaccacgatgcctgtagcaatggcaacaacgttgcgcaaactattaactggcgaactacttactctagcttcccggcaacaattaatagactggatggaggcggataaagttgcaggaccacttctgcgctcggcccttccggctggctggtttattgctgataaatctggagccggtgagcgtggttctcgcggtatcattgcagcactggggccagatggtaagccctcccgtatcgtagttatctacacgacggggagtcaggcaactatggatgaacgaaatagacagatcgctgagataggtgcctcactgattaagcattggtaatgtctaacaattcgttcaagccgacgccgcttcgcggcgcggcttaactcaagcgttagatgctgcaggcatcgtggtgtcacgctcgtcgtttggtatggcttcattcagctccggttcccaacgatcaaggcgagttacatgatcccccatgttgtgcaaaaaagcggttagctccttcggtcctccgatcgaggatttttcggcgctgcgctacgtccgcgaccgcgttgagggatcaagccacagcagcccactcgaccttctagccgacccagacgagccaagggatctttttggaatgctgctccgtcgtcaggctttccgacgtttgggtggttgaacagaagtcattatcgcacggaatgccaagcactcccgaggggaaccctgtggttggcatgcacatacaaatggacgaacggataaaccttttcacgcccttttaaatatccgattattctaataaacgctcttttctcttaggtttacccgccaatatatcctgtcaaacactgatagtttaaactgaaggcgggaaacgacaatctcctaggttggtgtgaaacagatgatttgctgctgtaacaaagtaaattatgtctcgacttttaaggcccctttcattttattagattattttattttaattaatgttcttgtcccattttgcaacagatggatgctactacacccaagtattccaaggccaggtatgatgaaattgtgaaggaagtctcttcctacttgaagaaagtaggatacaaccctgacaagattccttttgttcctatctctggttttgagggagacaacatgattgagaggtccacaaaccttgactggtacaagggtccaactctgcttgatgcacttgaccagattagtgagcccaagaggccctctgacaagcccctcaggcttccccttcaggatgtgtacaagattggaggtattggaactgtgccagtgggacgtgttgagaccggtgtcttgaagcctggaatggtggtgacttttgcaccaactggactgacaactgaagtcaagtctgtggagatgcaccatgaatctcttacagaggcacatcctggtgacaatgtgggattcaatgttaagaatgttgctgttaaggatttgaagcgtggttatgttgcctcaaactcaaaggatgaccctgcaaaggaggctgctaacttcacagcccaagtcatcatcatgaaccaccctggtcagattggaaatggctatgcccctgtcctcgactgccacacttctcacattgctgtcaagtttgctgaactcatgaccaagattgacaggcgatccggcaaagagcttgagaaggagcccaagtttttgaagaacggtgatgctggttttgttaagatgattccaaccaaacccatggttgttgaaactttctccgagtatcctccacttggtaggtttgctgttagggacatgcgtcaaactgttgctgtgggagtcatcaagaacgttgagaagaaggatcctaccggagccaaggtcaccaaggctgcccagaagaagaagtcaaatgctgctgatgaagtggcaactcaattactgaattttgacctcttgaagcttgccggtgatgttgagtctaaccctggaccaatggcgcaagttagcagaatctgcaatggtgtgcagaacccatctcttatctccaatctctcgaaatccagtcaacgcaaatctcccttatcggtttctctgaagacgcagcagcatccacgagcttatccgatttcgtcgtcgtggggattgaagaagagtgggatgacgttaattggctctgagcttcgtcctcttaaggtcatgtcttctgtttccacggcgtgcatgggggaagcggtgatcgccgaagtatcgactcaactatcagaggtagttggcgtcatcgagcgccatctcgaaccgacgttgctggccgtacatttgtacggctccgcagtggatggcggcctgaagccacacagtgatattgatttgctggttacggtgaccgtaaggcttgatgaaacaacgcggcgagctttgatcaacgaccttttggaaacttcggcttcccctggagagagcgagattctccgcgctgtagaagtcaccattgttgtgcacgacgacatcattccgtggcgttatccagctaagcgcgaactgcaatttggagaatggcagcgcaatgacattcttgcaggtatcttcgagccagccacgatcgacattgatctggctatcttgctgacaaaagcaagagaacatagcgttgccttggtaggtccagcggcggaggaactctttgatccggttcctgaacaggatctatttgaggcgctaaatgaaaccttaacgctatggaactcgccgcccgactgggctggcgatgagcgaaatgtagtgcttacgttgtcccgcatttggtacagcgcagtaaccggcaaaatcgcgccgaaggatgtcgctgccgactgggcaatggagcgcctgccggcccagtatcagcccgtcatacttgaagctagacaggcttatcttggacaagaagaagatcgcttggcctcgcgcgcagatcagttggaagaatttgtccactacgtgaaaggcgagatcaccaaggtagtcggcaaatgaatcgtgcgggctggttcatcagggaatgttggctacaatcaatgttggtttcttttctgtactcttgtgtcttcttttctaggtagcttgtttttcggacaaagtttgaagtctccaccatcatctcgcaactgttgttcccagaactgggttcttgatcgacggtggcaaaattgcttttatttatctgtgttttaatgtgttgtgtttgtcggaacccctgattacatttttgttaagcgcagcgagtttcaggactttgctgcgttgtgttgctttggtttattaaatgtcaactttctatttgtagtgttcaatttttggcttggtttgctttttctttataatttgtgttcaaattttggcttggtttgcttttactataatttgtgttcaaattttgggttggattttttaacgatcggctgtttgctcttcttcctctgttttgatgtgttcgtgactatgcaagaatcttcaattttgctaaaataaacttgctttgacaacatagaatcaaatccgagtgctttaatattcggtggtttgtttttatttttggttttatgaaagttaaaattttaaaagtaaatcgataaggtataattgtggtttttatttatcgagaattttttaagtgaatcgatataatttatttcccctaaaataaaataccaaagaatcgaattcgaactttgtctttaataaaactactaatttaatcattatttgttctgtgtaagcatgagaaataaattctacttatcttttagtttaaaaccaaaacaggttaagaataatttttctaaggccgttatcaaggtcaccaaaaatctattcgatctgaccatatattttcgatacttgtacgattcgcagatgttgattggaaattgcaatgaataaattacaaatgccaaatccgattatgcaatgaatgaattacaagtgcatttatccgttttgaatctgttcatgtctaccaatgggagagatttttttcctgcatctgccatacatatgggaagaccgaaaatactttcctaggctggcagcacatcccccgttcgcgagctggcgtaacagcgaagaggcccgggcgcgccactgttaataatttttaaacgtcagcgcactaaaaaaacgaaaagacggacacgtgaaaataaaaaacacacactagtttatgacgcaatactattttacttatgatttgggtacattagacaaaaccgtgaaagagatgtatcagctatgaaacctgtatacttcaatacagagacttactcatatcggatacgtacgcacgaagtatcatattaattattttaatttttaataaatattttatcggatacttatgtgatactctacatatacacaaggatatttctaagatactttatagatacgtatcctagaaaaacatgaagagtaaaaaagtgagacaatgttgtaaaaattcattataaatgtatatgattcaattttagatatgcatcagtataattgattctcgatgaaacacttaaaattatatttcttgtggaagaacgtagcgagagaggtgattcagttagacaacattaaataaaattaatgttaagttcttttaatgatgtttctctcaatatcacatcatatgaaaatgtaatatgatttataagaaaatttttaaaaaatttattttaataatcacatgtactattttttaaaaattgtatcttttataataatacaataataaagagtaatcagtgttaatttttcttcaaatataagttttattataaatcattgttaacgtatcataagtcattaccgtatcgtatcttaatttttttttaaaaaccgctaattcacgtacccgtattgtattgtacccgcacctgtatcacaatcgatcttagttagaagaattgtctcgaggcggtgcaagacagcatataatagacgtggactctcttataccaaacgttgtcgtatcacaaagggttaggtaacaagtcacagtttgtccacgtgtcacgttttaattggaagaggtgccgttggcgtaatataacagccaatcgatttttgctataaaagcaaatcaggtaaactaaacttcttcattcttttcttccccatcgctacaaaaccggttcctttggaaaagagattcattcaaacctagcacccaattccgtttcaaggtataatctactttctattcttcgattattttattattattagctactatcgtttaatcgatcttttcttttgatccgtcaaatttaaattcaattagggttttgttcttttctttcatctgattgaaatccttctgaattgaaccgtttacttgattttactgtttattgtatgatttaatcctttgtttttcaaagacagtctttagattgtgattaggggttcatataaatttttagatttggatttttgtattgtatgattcaaaaaatacgtcctttaattagattagtacatggatattttttacccgatttattgattgtcagggagaatttgatgagcaagtttttttgatgtctgttgtaaattgaattgattataattgctgatctgctgcttccagttttcataacccatattcttttaaccttgttgtacacacaatgaaaaattggtgattgattcatttgtttttctttgttttggattatacagggtatggcgccgccgcctgccctccctccaaagaggcgaagaagtggtggatcttccggggggtccccccctcctgctttacctccaaaaagacgtcgttctggtggttcaagtggaggttctccacctcctgcacttcctcccaagagaagaaggagcggcggcagctcaggaggatcaccaccaccagctttgccacccaaaaggcgccggggctcctccgagacaccaggcacctccgagagcgcgacgcccgagggcggctccggcggctccggcagctccaagctggagaagtttacaaactgttacagcctctccaaaaccctcaggtttaaagcgatcccggtgggcaagacccaggagaacatcgacaacaagaggctcctggtggaagacgagaagcgcgccgaagactacaagggcgtgaagaagctgctcgataggtactacctcagctttattaacgacgtgctgcacagcatcaaactcaagaatctcaacaactacatctccctcttccgcaaaaagacccgcaccgagaaggagaacaaggagctggagaacctggagatcaacctccgcaaggaaatcgccaaagcgttcaagggcaatgaagggtacaagagcctcttcaagaaagacatcatcgaaactatcctcccagagtttctcgatgacaaggacgagatcgcgctggtgaactcctttaacgggttcacaaccgcgtttaccggcttctttgataacagggaaaatatgttctccgaggaggccaagtccaccagcatcgccttcaggtgtatcaacgagaacctcacccgctacatttccaatatggacattttcgagaaggtggatgcgatcttcgataagcacgaggtgcaggagatcaaagagaagattctcaattccgattatgacgtcgaggatttcttcgaaggggagttctttaattttgtgctcacacaagagggcattgacgtgtacaacgcgattatcgggggcttcgtcacagagtccggggagaagattaaggggctgaatgagtacatcaatctgtacaatcagaagaccaagcagaaactgccgaaattcaagccgctctacaagcaagtcctgtccgatagggaaagcctctccttctacggcgagggctataccagcgacgaggaggtgctggaagtcttccgcaacacactgaataagaatagcgagattttctcctccatcaagaagctcgagaagctctttaagaactttgacgagtacagctccgccgggattttcgtgaagaacgggccggcgatcagcaccatctccaaggacatctttggcgagtggaacgtcatcagggacaagtggaacgccgagtacgacgacatccacctgaagaagaaggcggtggtgaccgagaagtatgaggacgatcgcaggaagtccttcaaaaaaatcggctccttcagcctcgaacagctccaggagtatgccgatgcggatctgtccgtcgtcgagaagctgaaggaaatcatcattcagaaggtcgacgagatctataaagtgtacgggtccagcgagaagctgttcgacgccgactttgtgctcgagaagtccctcaaaaagaatgacgccgtggtggccattatgaaagacctgctcgactccgtgaagtccttcgaaaattacattaaagcgttctttggggaggggaaggaaactaacagggatgagtccttctatggcgactttgtcctcgcgtacgacatcctgctgaaggtcgaccacatttacgacgcgatccgcaactacgtgacacagaagccgtactccaaagacaagttcaagctgtacttccagaacccgcaatttatggggggctgggacaaggataaagagacagactaccgcgcgacaattctccgctatggctccaaatactatctggccatcatggacaagaagtacgcgaagtgcctgcagaagatcgacaaagacgacgtcaatggcaactatgaaaagatcaactacaagctgctgccgggtccgaacaagatgctcccgaaggtgttcttcagcaagaagtggatggcctactacaatccaagcgaggatattcagaaaatctataaaaacgggaccttcaagaagggggacatgtttaacctcaacgactgccacaagctcattgatttcttcaaggatagcatttcccgctacccgaaatggtccaatgcgtacgattttaacttctccgagacagaaaagtacaaagacatcgcgggcttttacagggaggtggaggagcaagggtataaagtttcttttgaatccgcgagcaagaaggaagtcgacaagctcgtcgaggagggcaagctctacatgttccaaatttataacaaggacttttccgacaagagccatgggaccccaaacctccacaccatgtacttcaaactgctctttgacgagaacaaccacgggcaaatcaggctgagcggcggcgccgaattattcatgcgcagggcctccctcaagaaggaagagctggtcgtccatccagccaattccccgatcgcgaacaagaacccggacaatccgaaaaagaccaccaccctgtcctacgacgtctacaaggacaaacgcttcagcgaagaccagtacgaattacacatcccaattgcgattaataagtgcccaaagaatatcttcaaaattaatacagaggtcagggtgctgctcaaacacgacgacaatccgtatgtcatcggcattgacaggggcgagcgcaatctgctctatatcgtggtcgtggatgggaagggcaatattgtggagcagtactccctgaacgagattatcaacaacttcaatgggattaggattaagaccgactatcacagcctgctcgacaagaaagaaaaagagaggtttgaggcccgccaaaactggacctccattgagaatatcaaagaattaaaggccggctatatttcccaagtcgtccacaagatctgcgagctggtggagaaatatgacgccgtgattgcgctcgaagacttaaattctgggttcaagaactcccgcgtgaaggtggaaaaacaggtgtatcagaaattcgagaaaatgctgatcgacaaactcaattatatggtggataagaagtccaacccgtgtgccacagggggcgcgctgaagggctatcagatcaccaacaagttcgagagcttcaagagcatgagcacccagaacgggtttattttctacatcccggcgtggctcacctccaagattgacccgagcaccggcttcgtgaacctcctgaagacaaagtatacctccattgccgacagcaagaagtttatctcctccttcgaccgcattatgtatgtgccggaggaggacctcttcgagttcgccctcgactacaaaaacttcagccgcacagatgcggattacatcaagaagtggaagctgtactcctacgggaacaggatccgcatcttcaggaatccaaaaaaaaataacgtctttgactgggaggaagtgtgcctgacatccgcctacaaggaactgttcaataaatacggcatcaattaccagcagggcgacattcgcgccctcctctgtgagcagtccgacaaagcgttttactccagcttcatggccctcatgtccctgatgctccaaatgaggaatagcatcacagggcgcaccgacgtcgacttcctcatcagcccggtgaagaactccgacgggatcttttacgactcccgcaactatgaggcgcaagagaatgcgatcctcccgaagaacgccgatgcgaacggggcctataatatcgccaggaaagtgctctgggccatcgggcagttcaaaaaggcggaggatgagaagctcgacaaggtgaaaattgccatttccaacaaggagtggctggagtacgcgcagacctccgtgaagcactgaaagggctctctgtcatgatttcatactttcattattgagctctgtaattacaattatgaccatgagaacatctcttattgtgtggccttttaattgctgatgttagtactgaaccaaagcttatcgtgatgatgtaaaagcaataagtacttgtttgtagcttctttgtgtctccctttgggcttaatacatctgtttagtgttgtggctttggcatagacttctcttggtaataatgccttgcaatgcaaaatttcaattatcaaattctattatgttctcaccttatggtaacagcttaccctgtggaagatgagattcttgagttgagtcattgccaatttttggcattagcttttgaattagtgaattttgacaaaaattaccgtgacactgattttgttgaagctcttaagtgtagtttttacaaaatttcagtggctcgttgtgattatgtcaaactcacggcgaatgtagttcttacagaatttcagtggctccctgcaggctcgaggtcattcatatgcttgagaagagagtcgggatagtccaaaataaaacaaaggtaagattacctggtcaaaagtgaaaacatcagttaaaaggtggtataaagtaaaatatcggtaataaaaggtggcccaaagtgaaatttactcttttctactattataaaaattgaggatgtttttgtcggtactttgatacgtcatttttgtatgaattggtttttaagtttattcgcttttggaaatgcatatctgtatttgagtcgggttttaagttcgtttgcttttgtaaatacagagggatttgtataagaaatatctttagaaaaacccatatgctaatttgacataatttttgagaaaaatatatattcaggcgaattctcacaatgaacaataataagattaaaatagctttcccccgttgcagcgcatgggtattttttctagtaaaaataaaagataaacttagactcaaaacatttacaaaaacaacccctaaagttcctaaagcccaaagtgctatccacgatccatagcaagcccagcccaacccaacccaacccaacccaccccagtccagccaactggacaatagtctccacacccccccactatcaccgtgagttgtccgcacgcaccgcacgtctcgcagccaaaaaaaaaaagaaagaaaaaaaagaaaaagaaaaaacagcaggtgggtccgggtcgtgggggccggaaacgcgaggaggatcgcgagccagcgacgaggagcttaggcctcatcgttgaagatgcctctgccgacagtggtcccaaagatggacccccacccacgaggagcatcgtggaaaaagaagacgttccaaccacgtcttcaaagcaagtggattgatgtgatatctccactgacgtaagggatgacgcacaatcccactatccttcgaggcctcatcgttgaagatgcctctgccgacagtggtcccaaagatggacccccacccacgaggagcatcgtggaaaaagaagacgttccaaccacgtcttcaaagcaagtggattgatgtgatatctccactgacgtaagggatgacgcacaatcccactatccttcgaagctccctccctccgcttccaaagaaacgccccccatcgccactatatacatacccccccctctcctcccatccccccaacccttctagaaccatcttccacacactcaagccacactattggagaacacacagggacaacacaccataagatccaagggaggcctccgccgccgccggtaaccaccccgcccctctcctctttctttctccgtttttttttccgtctcggtctcgatctttggccttggtagtttgggtgggcgagaggcggcttcgtgcgcgcccagatcggtgcgcgggaggggcgggatctcgcggctggggctctcgccggcgtggatccggcccggatctcgcggggaatggggctctcggatgtagatctgcgatccgccgttgttgggggagatgatggggggtttaaaatttccgccgtgctaaacaagatcaggaagaggggaaaagggcactatggtttatatttttatatatttctgctgcttcgtcaggcttagatgtgctagatctttctttcttctttttgtgggtagaatttgaatccctcagcattgttcatcggtagtttttcttttcatgatttgtgacaaatgcagcctcgtgcggagcttttttgtaggtagaaggcggccgcatggcccagtctaagcacgggttgacgaaggagatgactatgaagtatcgcatggaaggctgcgttgacggccacaaattcgtcattaccggcgagggcatcggctacccctttaaggtaagtttctgcttctacctttgatatatatataataattatcattaattagtagtaatataatatttcaaatatttttttcaaaataaaagaatgtagtatatagcaattgcttttctgtagtttataagtgtgtatattttaatttataacttttctaatatatgaccaaaatttgttgatgtgcagggcaagcaagcgataaacctgtgcgtggtggagggtggccctctgcccttcgccgaggatatactctcagccgccttcatgtacgggaatcgggtgttcacggagtacccgcaagacatcgtggactacttcaagaactcctgccccgccggatacacatgggaccgttccttcctcttcgaggacggagccgtttgcatctgcaacgcggacatcaccgtgtccgtcgaggagaactgcatgtaccacgagtcaaagttctatggagtgaacttcccggccgatggtcccgtgatgaagaaaatgacggacaactgggagccgtcgtgcgagaaaatcattcccgtcccaaaacagggaatcctcaagggcgacgtgtcgatgtacctacttctcaaggacggtggacggctacggtgccagttcgacactgtttacaaggcgaagtcggtgccgaggaagatgccggactggcactttatccagcacaagctgacaagggaggacagaagcgacgctaagaaccagaaatggcacctcaccgagcacgccatcgccagtggctctgcgctgcccgggtgaccctgcaatgtgaccctagacttgtccatcttctggattggccaacttaattaatgtatgaaataaaaggatgcacacatagtgacatgctaatcactataatgtgggcatcaaagttgtgtgttatgtgtaattactaattatctgaataagagaaagagatcatccatatttcttatcctaaatgaatgtcacgtgtctttataattctttgatgaaccagatgcattttattaaccaattccatatacatataaatattaatcatatataattaatatcaattgggttagcaaaacaaatctagtctaggtgtgttttgctaattattgggggatagtgcaaaaagaaatctacgttctcaataattcagatagaaaacttaataaagtgagataatttacatagattgcttttatcctttgatatatgtgaaaccatgcatgatataaggaaaatagatagagaaataattttttacatcgttgaatatgtaaacaatttaattcaagaagctaggaatataaatattgaggagtttatgattattattattattttgatgttcaatgaagttttttttaatttcatatgaagtatacaaaaattcttcatagatttttgtttctatgccgtagttatctttaatatatttgtggttgaagaaatttattgctagaaacgaatggattgtcaatttttttttaaagcaaatatatatgaaattatactgtatattattttagtcatgattaaaatgtggccttaattgaatcatctttctcattcattttttcaaaagcatatcaggatgattgatatttatctattttaaaaattaatttaagggttcaaattaaatttaacttaaaagtgtcctaaccgtagttaaaggtttactttaaaaaaatactatgaaaaatctaatcttctatgaatcgagggcccttagctagttag

SEQ ID NO: 92 - DNA, 19084 bp, synthetic construct
  misc_feature 1..19084: note = pWISE3588 Full plasmid sequence
  source 1..19084: mol_type = other DNA
aagcttcgataaaaatgttttaaacgatatatattataaaaaaaaacgtttcaaaaataaatacaaaaatgtttttaaatatatataatttaactcattaaagaaaataaaaatgcaagtgcggtgacaagacaagctaaaagttgcaaaagaaatggcagggctataaggctcacctactcctggatttaccaaattttggttcgtccctatactcgaaaaataaaacaaaataaatttcagtatcttcgtttttgtatgctttgactgtgaggcgaggccaactttcttcttctgtctgagatgaattttgtttgcctcctgtgaaggatgtatcattcaaagtgaatgttttgcaactgccagtagtcccacatcgaccaaatattcttattacagtgtgtttatatagcacctggagaaggaatgggttgtttcaaagattaaataatttctactaagtgtagatttgtaaccaacatcccctgatgataatttctactaagtgtagattttttttactagtgatatccgtcgactggtacctacgcgtagctagcccgtgaagtttctcatctaagcccccatttggacgtgaatgtagacacgtcgaaataaagatttccgaattagaataatttgtttattgctttcgcctataaatacgacggatcgtaatttgtcgttttatcaaaatgtactttcattttataataacgctgcggacatctacatttttgaattgaaaaaaaattggtaattactctttctttttctccatattgaccatcatactcattgctgatccatgtagatttcccggacatgaagccatttacaattgaatatatcctgccgccgctgccgctttgcacccggtggagcttgcatgttggtttctacgcagaactgagccggttaggcagataatttccattgagaactgagccatgtgcaccttccccccaacacggtgagcgacggggcaacggagtgatccacatgggacttttcctagcttggctgccatttttggggtgaggccgttcgcggccgaggggcgcagcccctggggggatgggaggcccgcgttagcgggccgggagggttcgagaagggggggcaccccccttcggcgtgcgcggtcacgcgcacagggcgcagccctggttaaaaacaaggtttataaatattggtttaaaagcaggttaaaagacaggttagcggtggccgaaaaacgggcggaaacccttgcaaatgctggattttctgcctgtggacagcccctcaaatgtcaataggtgcgcccctcatctgtcagcactctgcccctcaagtgtcaaggatcgcgcccctcatctgtcagtagtcgcgcccctcaagtgtcaataccgcagggcacttatccccaggcttgtccacatcatctgtgggaaactcgcgtaaaatcaggcgttttcgccgatttgcgaggctggccagctccacgtcgccggccgaaatcgagcctgcccctcatctgtcaacgccgcgccgggtgagtcggcccctcaagtgtcaacgtccgcccctcatctgtcagtgagggccaagttttccgcgaggtatccacaacgccggcggccggccgcggtgtctcgcacacggcttcgacggcgtttctggcgcgtttgcagggccatagacggccgccagcccagcggcgagggcaaccagcccggtgagcgtcggaaagggtcgatcgaccgatgcccttgagagccttcaacccagtcagctccttccggtgggcgcggggcatgactatcgtcgccgcacttatgactgtcttctttatcatgcaactcgtaggacaggtgccggcagcgctctgggtcattttcggcgaggaccgctttcgctggagcgcgacgatgatcggcctgtcgcttgcggtattcggaatcttgcacgccctcgctcaagccttcgtcactggtcccgccaccaaacgtttcggcgagaagcaggccattatcgccggcatggcggccgacgcgctgggctacgtcttgctggcgttcgcgacgcgaggctggatggccttccccattatgattcttctcgcttccggcggcatcgggatgcccgcgttgcaggccatgctgtccaggcaggtagatgacgaccatcagggacagcttcaaggatcgctcgcggctcttaccagcctaacttcgatcattggaccgctgatcgtcacggcgatttatgccgcctcggcgagcacatggaacgggttggcatggattgtaggcgccgccctataccttgtctgcctccccgcgttgcgtcgcggtgcatggagccgggccacctcgacctgaatggaagccggcggcacctcgctaacggattcaccactccaagaattggagccaatcaattcttgcggagaactgtgaatgcgcaaaccaacccttggcagaacatatccatcgcgtccgccatctccagcagccgcacgcggcgcatctcgggcagcgttgggtcctggccacgggtgcgcatgatcgtgctcctgtcgttgaggacccggctaggctggcggggttgccttactggttagcagaatgaatcaccgatacgcgagcgaacgtgaagcgactgctgctgcaaaacgtctgcgacctgagcaacaacatgaatggtcttcggtttccgtgtttcgtaaagtctggaaacgcggaagtcagcgccctgcaccattatgttccggatctgcatcgcaggatgctgctggctaccctgtggaacacctacatctgtattaacgaagcgctggcattgaccctgagtgatttttctctggtcccgccgcatccataccgccagttgtttaccctcacaacgttccagtaaccgggcatgttcatcatcagtaacccgtatcgtgagcatcctctctcgtttcatcggtatcattacccccatgaacagaaatcccccttacacggaggcatcagtgaccaaacaggaaaaaaccgcccttaacatggcccgctttatcagaagccagacattaacgcttctggagaaactcaacgagctggacgcggatgaacaggcagacatctgtgaatcgcttcacgaccacgctgatgagctttaccgcagctgcctcgcgcgtttcggtgatgacggtgaaaacctctgacacatgcagctcccggagacggtcacagcttgtctgtaagcggatgccgggagcagacaagcccgtcagggcgcgtcagcgggtgttggcgggtgtcggggcgcagccatgacccagtcacgtagcgatagcggagtgtatactggcttaactatgcggcatcagagcagattgtactgagagtgcaccatatgcggtgtgaaataccgcacagatgcgtaaggagaaaataccgcatcaggcgctcttccgcttcctcgctcactgactcgctgcgctcggtcgttcggctgcggcgagcggtatcagctcactcaaaggcggtaatacggttatccacagaatcaggggataacgcaggaaagaacatgtgagcaaaaggccagcaaaaggccaggaaccgtaaaaaggccgcgttgctggcgtttttccataggctccgcccccctgacgagcatcacaaaaatcgacgctcaagtcagaggtggcgaaacccgacaggactataaagataccaggcgtttccccctggaagctccctcgtgcgctctcctgttccgaccctgccgcttaccggatacctgtccgcctttctcccttcgggaagcgtggcgctttctcatagctcacgctgtaggtatctcagttcggtgtaggtcgttcgctccaagctgggctgtgtgcacgaaccccccgttcagcccgaccgctgcgccttatccggtaactatcgtcttgagtccaacccggtaagacacgacttatcgccactggcagcagccactggtaacaggattagcagagcgaggtatgtaggcggtgctacagagttcttgaagtggtggcctaactacggctacactagaaggacagtatttggtatctgcgctctgctgaagccagttaccttcggaaaaagagttggtagctcttgatccggcaaacaaaccaccgctggtagcggtggtttttttgtttgcaagcagcagattacgcgcagaaaaaaaggatctcaagaagatcctttgatcttttctacggggtctgacgctcagtggaacgaaaactcacgttaagggattttggtcatgagattatcaaaaaggatcttcacctagatccttttaaattaaaaatgaagttttaaatcaatctaaagtatatatgagtaaacttggtctgacagttaccaatgcttaatcagtgaggcacctatctcagcgatctgtctatttcgttcatccatagttgcctgactccccgtcgtgtagataactacgatacgggagggcttaccatctggccccagtgctgcaatgataccgcgagacccacgctcaccggctccagatttatcagcaataaaccagccagccggaagggccgagcgcagaagtggtcctgcaactttatccgcctccatccagtctattaattgttgccgggaagctagagtaagtagttcgccagttaatagtttgcgcaacgttgttgccattgctgcaggtcgggagcacaggatgacgcctaacaattcattcaagccgacaccgcttcgcggcgcggcttaattcaggagttaaacatcatgagtattcaacatttccgtgtcgcccttattcccttttttgcggcattttgccttcctgtttttgctcacccagaaacgctggtgaaagtaaaagatgctgaagatcagttgggtgcacgagtgggttacatcgaactggatctcaacagcggtaagatccttgagagttttcgccccgaagaacgttttccaatgatgagcacttttaaagttctgctatgtggcgcggtattatcccgtattgacgccgggcaagagcaactcggtcgccgcatacactattctcagaatgacttggttgagtactcaccagtcacagaaaagcatcttacggatggcatgacagtaagagaattatgcagtgctgccataaccatgagtgataacactgcggccaacttacttctgacaacgatcggaggaccgaaggagctaaccgcttttttgcacaacatgggggatcatgtaactcgccttgatcgttgggaaccggagctgaatgaagccataccaaacgacgagcgtgacaccacgatgcctgtagcaatggcaacaacgttgcgcaaactattaactggcgaactacttactctagcttcccggcaacaattaatagactggatggaggcggataaagttgcaggaccacttctgcgctcggcccttccggctggctggtttattgctgataaatctggagccggtgagcgtggttctcgcggtatcattgcagcactggggccagatggtaagccctcccgtatcgtagttatctacacgacggggagtcaggcaactatggatgaacgaaatagacagatcgctgagataggtgcctcactgattaagcattggtaatgtctaacaattcgttcaagccgacgccgcttcgcggcgcggcttaactcaagcgttagatgctgcaggcatcgtggtgtcacgctcgtcgtttggtatggcttcattcagctccggttcccaacgatcaaggcgagttacatgatcccccatgttgtgcaaaaaagcggttagctccttcggtcctccgatcgaggatttttcggcgctgcgctacgtccgcgaccgcgttgagggatcaagccacagcagcccactcgaccttctagccgacccagacgagccaagggatctttttggaatgctgctccgtcgtcaggctttccgacgtttgggtggttgaacagaagtcattatcgcacggaatgccaagcactcccgaggggaaccctgtggttggcatgcacatacaaatggacgaacggataaaccttttcacgcccttttaaatatccgattattctaataaacgctcttttctcttaggtttacccgccaatatatcctgtcaaacactgatagtttaaactgaaggcgggaaacgacaatctcctaggaaagtattttcggtcttcccatatgtatggcagatgcaggaaaaaaatctctcccattggtagacatgaacagattcaaaacggataaatgcacttgtaattcattcattgcataatcggatttggcatttgtaatttattcattgcaatttccaatcaacatctgcgaatcgtacaagtatcgaaaatatatggtcagatcgaatagatttttggtgaccttgataacggccttagaaaaattattcttaacctgttttggttttaaactaaaagataagtagaatttatttctcatgcttacacagaacaaataatgattaaattagtagttttattaaagacaaagttcgaattcgattctttggtattttattttaggggaaataaattatatcgattcacttaaaaaattctcgataaataaaaaccacaattataccttatcgatttacttttaaaattttaactttcataaaaccaaaaataaaaacaaaccaccgaatattaaagcactcggatttgattctatgttgtcaaagcaagtttattttagcaaaattgaagattcttgcatagtcacgaacacatcaaaacagaggaagaagagcaaacagccgatcgttaaaaaatccaacccaaaatttgaacacaaattatagtaaaagcaaaccaagccaaaatttgaacacaaattataaagaaaaagcaaaccaagccaaaaattgaacactacaaatagaaagttgacatttaataaaccaaagcaacacaacgcagcaaagtcctgaaactcgctgcgcttaacaaaaatgtaatcaggggttccgacaaacacaacacattaaaacacagataaataaaagcaattttgccaccgtcgatcaagaacccagttctgggaacaacagttgcgagatgatggtggagacttcaaactttgtccgaaaaacaagctacctagaaaagaagacacaagagtacagaaaagaaaccaacattgattgtagccaacattccctgatgaaccagcccgcacgattcatttgccgactaccttggtgatctcgcctttcacgtagtggacaaattcttccaactgatctgcgcgcgaggccaagcgatcttcttcttgtccaagataagcctgtctagcttcaagtatgacgggctgatactgggccggcaggcgctccattgcccagtcggcagcgacatccttcggcgcgattttgccggttactgcgctgtaccaaatgcgggacaacgtaagcactacatttcgctcatcgccagcccagtcgggcggcgagttccatagcgttaaggtttcatttagcgcctcaaatagatcctgttcaggaaccggatcaaagagttcctccgccgctggacctaccaaggcaacgctatgttctcttgcttttgtcagcaagatagccagatcaatgtcgatcgtggctggctcgaagatacctgcaagaatgtcattgcgctgccattctccaaattgcagttcgcgcttagctggataacgccacggaatgatgtcgtcgtgcacaacaatggtgacttctacagcgcggagaatctcgctctctccaggggaagccgaagtttccaaaaggtcgttgatcaaagctcgccgcgttgtttcatcaagccttacggtcaccgtaaccagcaaatcaatatcactgtgtggcttcaggccgccatccactgcggagccgtacaaatgtacggccagcaacgtcggttcgagatggcgctcgatgacgccaactacctctgatagttgagtcgatacttcggcgatcaccgcttcccccatgcacgccgtggaaacagaagacatgaccttaagaggacgaagctcagagccaattaacgtcatcccactcttcttcaatccccacgacgacgaaatcggataagctcgtggatgctgctgcgtcttcagagaaaccgataagggagatttgcgttgactggatttcgagagattggagataagagatgggttctgcacaccattgcagattctgctaacttgcgccattggtccagggttagactcaacatcaccggcaagcttcaagaggtcaaaattcagtaattgagttgccacttcatcagcagcatttgacttcttcttctgggcagccttggtgaccttggctccggtaggatccttcttctcaacgttcttgatgactcccacagcaacagtttgacgcatgtccctaacagcaaacctaccaagtggaggatactcggagaaagtttcaacaaccatgggtttggttggaatcatcttaacaaaaccagcatcaccgttcttcaaaaacttgggctccttctcaagctctttgccggatcgcctgtcaatcttggtcatgagttcagcaaacttgacagcaatgtgagaagtgtggcagtcgaggacaggggcatagccatttccaatctgaccagggtggttcatgatgatgacttgggctgtgaagttagcagcctcctttgcagggtcatcctttgagtttgaggcaacataaccacgcttcaaatccttaacagcaacattcttaacattgaatcccacattgtcaccaggatgtgcctctgtaagagattcatggtgcatctccacagacttgacttcagttgtcagtccagttggtgcaaaagtcaccaccattccaggcttcaagacaccggtctcaacacgtcccactggcacagttccaatacctccaatcttgtacacatcctgaaggggaagcctgaggggcttgtcagagggcctcttgggctcactaatctggtcaagtgcatcaagcagagttggacccttgtaccagtcaaggtttgtggacctctcaatcatgttgtctccctcaaaaccagagataggaacaaaaggaatcttgtcagggttgtatcctactttcttcaagtaggaagagacttccttcacaatttcatcatacctggccttggaatacttgggtgtagtagcatccatctgttgcaaaatgggacaagaacattaattaaaataaaataatctaataaaatgaaaggggccttaaaagtcgagacataatttactttgttacagcagcaaatcatctgtttcacaccaacctaggctggcagcacatcccccgttcgcgagctggcgtaacagcgaagaggcccgggcgcgccactgttaataatttttaaacgtcagcgcactaaaaaaacgaaaagacggacacgtgaaaataaaaaacacacactagtttatgacgcaatactattttacttatgatttgggtacattagacaaaaccgtgaaagagatgtatcagctatgaaacctgtatacttcaatacagagacttactcatatcggatacgtacgcacgaagtatcatattaattattttaatttttaataaatattttatcggatacttatgtgatactctacatatacacaaggatatttctaagatactttatagatacgtatcctagaaaaacatgaagagtaaaaaagtgagacaatgttgtaaaaattcattataaatgtatatgattcaattttagatatgcatcagtataattgattctcgatgaaacacttaaaattatatttcttgtggaagaacgtagcgagagaggtgattcagttagacaacattaaataaaattaatgttaagttcttttaatgatgtttctctcaatatcacatcatatgaaaatgtaatatgatttataagaaaatttttaaaaaatttattttaataatcacatgtactattttttaaaaattgtatcttttataataatacaataataaagagtaatcagtgttaatttttcttcaaatataagttttattataaatcattgttaacgtatcataagtcattaccgtatcgtatcttaatttttttttaaaaaccgctaattcacgtacccgtattgtattgtacccgcacctgtatcacaatcgatcttagttagaagaattgtctcgaggcggtgcaagacagcatataatagacgtggactctcttataccaaacgttgtcgtatcacaaagggttaggtaacaagtcacagtttgtccacgtgtcacgttttaattggaagaggtgccgttggcgtaatataacagccaatcgatttttgctataaaagcaaatcaggtaaactaaacttcttcattcttttcttccccatcgctacaaaaccggttcctttggaaaagagattcattcaaacctagcacccaattccgtttcaaggtataatctactttctattcttcgattattttattattattagctactatcgtttaatcgatcttttcttttgatccgtcaaatttaaattcaattagggttttgttcttttctttcatctgattgaaatccttctgaattgaaccgtttacttgattttactgtttattgtatgatttaatcctttgtttttcaaagacagtctttagattgtgattaggggttcatataaatttttagatttggatttttgtattgtatgattcaaaaaatacgtcctttaattagattagtacatggatattttttacccgatttattgattgtcagggagaatttgatgagcaagtttttttgatgtctgttgtaaattgaattgattataattgctgatctgctgcttccagttttcataacccatattcttttaaccttgttgtacacacaatgaaaaattggtgattgattcatttgtttttctttgttttggattatacagggtatggcgccgccgcctgccctccctccaaagaggcgaagaagtggtggatcttccggggggtccccccctcctgctttacctccaaaaagacgtcgttctggtggttcaagtggaggttctccacctcctgcacttcctcccaagagaagaaggagcggcggcagctcaggaggatcaccaccaccagctttgccacccaaaaggcgccggggctcctccgagacaccaggcacctccgagagcgcgacgcccgagggcggctccggcggctccggcagctccaagctggagaagtttacaaactgttacagcctctccaaaaccctcaggtttaaagcgatcccggtgggcaagacccaggagaacatcgacaacaagaggctcctggtggaagacgagaagcgcgccgaagactacaagggcgtgaagaagctgctcgataggtactacctcagctttattaacgacgtgctgcacagcatcaaactcaagaatctcaacaactacatctccctcttccgcaaaaagacccgcaccgagaaggagaacaaggagctggagaacctggagatcaacctccgcaaggaaatcgccaaagcgttcaagggcaatgaagggtacaagagcctcttcaagaaagacatcatcgaaactatcctcccagagtttctcgatgacaaggacgagatcgcgctggtgaactcctttaacgggttcacaaccgcgtttaccggcttctttgataacagggaaaatatgttctccgaggaggccaagtccaccagcatcgccttcaggtgtatcaacgagaacctcacccgctacatttccaatatggacattttcgagaaggtggatgcgatcttcgataagcacgaggtgcaggagatcaaagagaagattctcaattccgattatgacgtcgaggatttcttcgaaggggagttctttaattttgtgctcacacaagagggcattgacgtgtacaacgcgattatcgggggcttcgtcacagagtccggggagaagattaaggggctgaatgagtacatcaatctgtacaatcagaagaccaagcagaaactgccgaaattcaagccgctctacaagcaagtcctgtccgatagggaaagcctctccttctacggcgagggctataccagcgacgaggaggtgctggaagtcttccgcaacacactgaataagaatagcgagattttctcctccatcaagaagctcgagaagctctttaagaactttgacgagtacagctccgccgggattttcgtgaagaacgggccggcgatcagcaccatctccaaggacatctttggcgagtggaacgtcatcagggacaagtggaacgccgagtacgacgacatccacctgaagaagaaggcggtggtgaccgagaagtatgaggacgatcgcaggaagtccttcaaaaaaatcggctccttcagcctcgaacagctccaggagtatgccgatgcggatctgtccgtcgtcgagaagctgaaggaaatcatcattcagaaggtcgacgagatctataaagtgtacgggtccagcgagaagctgttcgacgccgactttgtgctcgagaagtccctcaaaaagaatgacgccgtggtggccattatgaaagacctgctcgactccgtgaagtccttcgaaaattacattaaagcgttctttggggaggggaaggaaactaacagggatgagtccttctatggcgactttgtcctcgcgtacgacatcctgctgaaggtcgaccacatttacgacgcgatccgcaactacgtgacacagaagccgtactccaaagacaagttcaagctgtacttccagaacccgcaatttatggggggctgggacaaggataaagagacagactaccgcgcgacaattctccgctatggctccaaatactatctggccatcatggacaagaagtacgcgaagtgcctgcagaagatcgacaaagacgacgtcaatggcaactatgaaaagatcaactacaagctgctgccgggtccgaacaagatgctcccgaaggtgttcttcagcaagaagtggatggcctactacaatccaagcgaggatattcagaaaatctataaaaacgggaccttcaagaagggggacatgtttaacctcaacgactgccacaagctcattgatttcttcaaggatagcatttcccgctacccgaaatggtccaatgcgtacgattttaacttctccgagacagaaaagtacaaagacatcgcgggcttttacagggaggtggaggagcaagggtataaagtttcttttgaatccgcgagcaagaaggaagtcgacaagctcgtcgaggagggcaagctctacatgttccaaatttataacaaggacttttccgacaagagccatgggaccccaaacctccacaccatgtacttcaaactgctctttgacgagaacaaccacgggcaaatcaggctgagcggcggcgccgaattattcatgcgcagggcctccctcaagaaggaagagctggtcgtccatccagccaattccccgatcgcgaacaagaacccggacaatccgaaaaagaccaccaccctgtcctacgacgtctacaaggacaaacgcttcagcgaagaccagtacgaattacacatcccaattgcgattaataagtgcccaaagaatatcttcaaaattaatacagaggtcagggtgctgctcaaacacgacgacaatccgtatgtcatcggcattgacaggggcgagcgcaatctgctctatatcgtggtcgtggatgggaagggcaatattgtggagcagtactccctgaacgagattatcaacaacttcaatgggattaggattaagaccgactatcacagcctgctcgacaagaaagaaaaagagaggtttgaggcccgccaaaactggacctccattgagaatatcaaagaattaaaggccggctatatttcccaagtcgtccacaagatctgcgagctggtggagaaatatgacgccgtgattgcgctcgaagacttaaattctgggttcaagaactcccgcgtgaaggtggaaaaacaggtgtatcagaaattcgagaaaatgctgatcgacaaactcaattatatggtggataagaagtccaacccgtgtgccacagggggcgcgctgaagggctatcagatcaccaacaagttcgagagcttcaagagcatgagcacccagaacgggtttattttctacatcccggcgtggctcacctccaagattgacccgagcaccggcttcgtgaacctcctgaagacaaagtatacctccattgccgacagcaagaagtttatctcctccttcgaccgcattatgtatgtgccggaggaggacctcttcgagttcgccctcgactacaaaaacttcagccgcacagatgcggattacatcaagaagtggaagctgtactcctacgggaacaggatccgcatcttcaggaatccaaaaaaaaataacgtctttgactgggaggaagtgtgcctgacatccgcctacaaggaactgttcaataaatacggcatcaattaccagcagggcgacattcgcgccctcctctgtgagcagtccgacaaagcgttttactccagcttcatggccctcatgtccctgatgctccaaatgaggaatagcatcacagggcgcaccgacgtcgacttcctcatcagcccggtgaagaactccgacgggatcttttacgactcccgcaactatgaggcgcaagagaatgcgatcctcccgaagaacgccgatgcgaacggggcctataatatcgccaggaaagtgctctgggccatcgggcagttcaaaaaggcggaggatgagaagctcgacaaggtgaaaattgccatttccaacaaggagtggctggagtacgcgcagacctccgtgaagcactgaaagggctctctgtcatgatttcatactttcattattgagctctgtaattacaattatgaccatgagaacatctcttattgtgtggccttttaattgctgatgttagtactgaaccaaagcttatcgtgatgatgtaaaagcaataagtacttgtttgtagcttctttgtgtctccctttgggcttaatacatctgtttagtgttgtggctttggcatagacttctcttggtaataatgccttgcaatgcaaaatttcaattatcaaattctattatgttctcaccttatggtaacagcttaccctgtggaagatgagattcttgagttgagtcattgccaatttttggcattagcttttgaattagtgaattttgacaaaaattaccgtgacactgattttgttgaagctcttaagtgtagtttttacaaaatttcagtggctcgttgtgattatgtcaaactcacggcgaatgtagttcttacagaatttcagtggctccctgcaggctcgaggtcattcatatgcttgagaagagagtcgggatagtccaaaataaaacaaaggtaagattacctggtcaaaagtgaaaacatcagttaaaaggtggtataaagtaaaatatcggtaataaaaggtggcccaaagtgaaatttactcttttctactattataaaaattgaggatgtttttgtcggtactttgatacgtcatttttgtatgaattggtttttaagtttattcgcttttggaaatgcatatctgtatttgagtcgggttttaagttcgtttgcttttgtaaatacagagggatttgtataagaaatatctttagaaaaacccatatgctaatttgacataatttttgagaaaaatatatattcaggcgaattctcacaatgaacaataataagattaaaatagctttcccccgttgcagcgcatgggtattttttctagtaaaaataaaagataaacttagactcaaaacatttacaaaaacaacccctaaagttcctaaagcccaaagtgctatccacgatccatagcaagcccagcccaacccaacccaacccaacccaccccagtccagccaactggacaatagtctccacacccccccactatcaccgtgagttgtccgcacgcaccgcacgtctcgcagccaaaaaaaaaaagaaagaaaaaaaagaaaaagaaaaaacagcaggtgggtccgggtcgtgggggccggaaacgcgaggaggatcgcgagccagcgacgaggagcttaggcctcatcgttgaagatgcctctgccgacagtggtcccaaagatggacccccacccacgaggagcatcgtggaaaaagaagacgttccaaccacgtcttcaaagcaagtggattgatgtgatatctccactgacgtaagggatgacgcacaatcccactatccttcgaggcctcatcgttgaagatgcctctgccgacagtggtcccaaagatggacccccacccacgaggagcatcgtggaaaaagaagacgttccaaccacgtcttcaaagcaagtggattgatgtgatatctccactgacgtaagggatgacgcacaatcccactatccttcgaagctccctccctccgcttccaaagaaacgccccccatcgccactatatacatacccccccctctcctcccatccccccaacccttctagaaccatcttccacacactcaagccacactattggagaacacacagggacaacacaccataagatccaagggaggcctccgccgccgccggtaaccaccccgcccctctcctctttctttctccgtttttttttccgtctcggtctcgatctttggccttggtagtttgggtgggcgagaggcggcttcgtgcgcgcccagatcggtgcgcgggaggggcgggatctcgcggctggggctctcgccggcgtggatccggcccggatctcgcggggaatggggctctcggatgtagatctgcgatccgccgttgttgggggagatgatggggggtttaaaatttccgccgtgctaaacaagatcaggaagaggggaaaagggcactatggtttatatttttatatatttctgctgcttcgtcaggcttagatgtgctagatctttctttcttctttttgtgggtagaatttgaatccctcagcattgttcatcggtagtttttcttttcatgatttgtgacaaatgcagcctcgtgcggagcttttttgtaggtagaaggcggccgcatggcccagtctaagcacgggttgacgaaggagatgactatgaagtatcgcatggaaggctgcgttgacggccacaaattcgtcattaccggcgagggcatcggctacccctttaaggtaagtttctgcttctacctttgatatatatataataattatcattaattagtagtaatataatatttcaaatatttttttcaaaataaaagaatgtagtatatagcaattgcttttctgtagtttataagtgtgtatattttaatttataacttttctaatatatgaccaaaatttgttgatgtgcagggcaagcaagcgataaacctgtgcgtggtggagggtggccctctgcccttcgccgaggatatactctcagccgccttcatgtacgggaatcgggtgttcacggagtacccgcaagacatcgtggactacttcaagaactcctgccccgccggatacacatgggaccgttccttcctcttcgaggacggagccgtttgcatctgcaacgcggacatcaccgtgtccgtcgaggagaactgcatgtaccacgagtcaaagttctatggagtgaacttcccggccgatggtcccgtgatgaagaaaatgacggacaactgggagccgtcgtgcgagaaaatcattcccgtcccaaaacagggaatcctcaagggcgacgtgtcgatgtacctacttctcaaggacggtggacggctacggtgccagttcgacactgtttacaaggcgaagtcggtgccgaggaagatgccggactggcactttatccagcacaagctgacaagggaggacagaagcgacgctaagaaccagaaatggcacctcaccgagcacgccatcgccagtggctctgcgctgcccgggtgaccctgcaatgtgaccctagacttgtccatcttctggattggccaacttaattaatgtatgaaataaaaggatgcacacatagtgacatgctaatcactataatgtgggcatcaaagttgtgtgttatgtgtaattactaattatctgaataagagaaagagatcatccatatttcttatcctaaatgaatgtcacgtgtctttataattctttgatgaaccagatgcattttattaaccaattccatatacatataaatattaatcatatataattaatatcaattgggttagcaaaacaaatctagtctaggtgtgttttgctaattattgggggatagtgcaaaaagaaatctacgttctcaataattcagatagaaaacttaataaagtgagataatttacatagattgcttttatcctttgatatatgtgaaaccatgcatgatataaggaaaatagatagagaaataattttttacatcgttgaatatgtaaacaatttaattcaagaagctaggaatataaatattgaggagtttatgattattattattattttgatgttcaatgaagttttttttaatttcatatgaagtatacaaaaattcttcatagatttttgtttctatgccgtagttatctttaatatatttgtggttgaagaaatttattgctagaaacgaatggattgtcaatttttttttaaagcaaatatatatgaaattatactgtatattattttagtcatgattaaaatgtggccttaattgaatcatctttctcattcattttttcaaaagcatatcaggatgattgatatttatctattttaaaaattaatttaagggttcaaattaaatttaacttaaaagtgtcctaaccgtagttaaaggtttactttaaaaaaatactatgaaaaatctaatcttctatgaatcgagggcccttagctagttag

SEQ ID NO: 93 - DNA, 19080 bp, synthetic construct
  misc_feature 1..19080: note = pWISE3767 Full plasmid sequence
  source 1..19080: mol_type = other DNA
aagcttcgataaaaatgttttaaacgatatatattataaaaaaaaacgtttcaaaaataaatacaaaaatgtttttaaatatatataatttaactcattaaagaaaataaaaatgcaagtgcggtgacaagacaagctaaaagttgcaaaagaaatggcagggctataaggctcacctactcctggatttaccaaattttggttcgtccctatactcgaaaaataaaacaaaataaatttcagtatcttcgtttttgtatgctttgactgtgaggcgaggccaactttcttcttctgtctgagatgaattttgtttgcctcctgtgaaggatgtatcattcaaagtgaatgttttgcaactgccagtagtcccacatcgaccaaatattcttattacagtgtgtttatatagcacctggagaaggaatgggttgtttcaaagattaaataatttctactaagtgtagattgtgtgatgttcgatgttggatttaatttctactaagtgtagattttttttactagtgatatccgtcgactggtacctacgcgtagctagcccgtgaagtttctcatctaagcccccatttggacgtgaatgtagacacgtcgaaataaagatttccgaattagaataatttgtttattgctttcgcctataaatacgacggatcgtaatttgtcgttttatcaaaatgtactttcattttataataacgctgcggacatctacatttttgaattgaaaaaaaattggtaattactctttctttttctccatattgaccatcatactcattgctgatccatgtagatttcccggacatgaagccatttacaattgaatatatcctgccgccgctgccgctttgcacccggtggagcttgcatgttggtttctacgcagaactgagccggttaggcagataatttccattgagaactgagccatgtgcaccttccccccaacacggtgagcgacggggcaacggagtgatccacatgggacttttcctagcttggctgccatttttggggtgaggccgttcgcggccgaggggcgcagcccctggggggatgggaggcccgcgttagcgggccgggagggttcgagaagggggggcaccccccttcggcgtgcgcggtcacgcgcacagggcgcagccctggttaaaaacaaggtttataaatattggtttaaaagcaggttaaaagacaggttagcggtggccgaaaaacgggcggaaacccttgcaaatgctggattttctgcctgtggacagcccctcaaatgtcaataggtgcgcccctcatctgtcagcactctgcccctcaagtgtcaaggatcgcgcccctcatctgtcagtagtcgcgcccctcaagtgtcaataccgcagggcacttatccccaggcttgtccacatcatctgtgggaaactcgcgtaaaatcaggcgttttcgccgatttgcgaggctggccagctccacgtcgccggccgaaatcgagcctgcccctcatctgtcaacgccgcgccgggtgagtcggcccctcaagtgtcaacgtccgcccctcatctgtcagtgagggccaagttttccgcgaggtatccacaacgccggcggccggccgcggtgtctcgcacacggcttcgacggcgtttctggcgcgtttgcagggccatagacggccgccagcccagcggcgagggcaaccagcccggtgagcgtcggaaagggtcgatcgaccgatgcccttgagagccttcaacccagtcagctccttccggtgggcgcggggcatgactatcgtcgccgcacttatgactgtcttctttatcatgcaactcgtaggacaggtgccggcagcgctctgggtcattttcggcgaggaccgctttcgctggagcgcgacgatgatcggcctgtcgcttgcggtattcggaatcttgcacgccctcgctcaagccttcgtcactggtcccgccaccaaacgtttcggcgagaagcaggccattatcgccggcatggcggccgacgcgctgggctacgtcttgctggcgttcgcgacgcgaggctggatggccttccccattatgattcttctcgcttccggcggcatcgggatgcccgcgttgcaggccatgctgtccaggcaggtagatgacgaccatcagggacagcttcaaggatcgctcgcggctcttaccagcctaacttcgatcattggaccgctgatcgtcacggcgatttatgccgcctcggcgagcacatggaacgggttggcatggattgtaggcgccgccctataccttgtctgcctccccgcgttgcgtcgcggtgcatggagccgggccacctcgacctgaatggaagccggcggcacctcgctaacggattcaccactccaagaattggagccaatcaattcttgcggagaactgtgaatgcgcaaaccaacccttggcagaacatatccatcgcgtccgccatctccagcagccgcacgcggcgcatctcgggcagcgttgggtcctggccacgggtgcgcatgatcgtgctcctgtcgttgaggacccggctaggctggcggggttgccttactggttagcagaatgaatcaccgatacgcgagcgaacgtgaagcgactgctgctgcaaaacgtctgcgacctgagcaacaacatgaatggtcttcggtttccgtgtttcgtaaagtctggaaacgcggaagtcagcgccctgcaccattatgttccggatctgcatcgcaggatgctgctggctaccctgtggaacacctacatctgtattaacgaagcgctggcattgaccctgagtgatttttctctggtcccgccgcatccataccgccagttgtttaccctcacaacgttccagtaaccgggcatgttcatcatcagtaacccgtatcgtgagcatcctctctcgtttcatcggtatcattacccccatgaacagaaatcccccttacacggaggcatcagtgaccaaacaggaaaaaaccgcccttaacatggcccgctttatcagaagccagacattaacgcttctggagaaactcaacgagctggacgcggatgaacaggcagacatctgtgaatcgcttcacgaccacgctgatgagctttaccgcagctgcctcgcgcgtttcggtgatgacggtgaaaacctctgacacatgcagctcccggagacggtcacagcttgtctgtaagcggatgccgggagcagacaagcccgtcagggcgcgtcagcgggtgttggcgggtgtcggggcgcagccatgacccagtcacgtagcgatagcggagtgtatactggcttaactatgcggcatcagagcagattgtactgagagtgcaccatatgcggtgtgaaataccgcacagatgcgtaaggagaaaataccgcatcaggcgctcttccgcttcctcgctcactgactcgctgcgctcggtcgttcggctgcggcgagcggtatcagctcactcaaaggcggtaatacggttatccacagaatcaggggataacgcaggaaagaacatgtgagcaaaaggccagcaaaaggccaggaaccgtaaaaaggccgcgttgctggcgtttttccataggctccgcccccctgacgagcatcacaaaaatcgacgctcaagtcagaggtggcgaaacccgacaggactataaagataccaggcgtttccccctggaagctccctcgtgcgctctcctgttccgaccctgccgcttaccggatacctgtccgcctttctcccttcgggaagcgtggcgctttctcatagctcacgctgtaggtatctcagttcggtgtaggtcgttcgctccaagctgggctgtgtgcacgaaccccccgttcagcccgaccgctgcgccttatccggtaactatcgtcttgagtccaacccggtaagacacgacttatcgccactggcagcagccactggtaacaggattagcagagcgaggtatgtaggcggtgctacagagttcttgaagtggtggcctaactacggctacactagaaggacagtatttggtatctgcgctctgctgaagccagttaccttcggaaaaagagttggtagctcttgatccggcaaacaaaccaccgctggtagcggtggtttttttgtttgcaagcagcagattacgcgcagaaaaaaaggatctcaagaagatcctttgatcttttctacggggtctgacgctcagtggaacgaaaactcacgttaagggattttggtcatgagattatcaaaaaggatcttcacctagatccttttaaattaaaaatgaagttttaaatcaatctaaagtatatatgagtaaacttggtctgacagttaccaatgcttaatcagtgaggcacctatctcagcgatctgtctatttcgttcatccatagttgcctgactccccgtcgtgtagataactacgatacgggagggcttaccatctggccccagtgctgcaatgataccgcgagacccacgctcaccggctccagatttatcagcaataaaccagccagccggaagggccgagcgcagaagtggtcctgcaactttatccgcctccatccagtctattaattgttgccgggaagctagagtaagtagttcgccagttaatagtttgcgcaacgttgttgccattgctgcaggtcgggagcacaggatgacgcctaacaattcattcaagccgacaccgcttcgcggcgcggcttaattcaggagttaaacatcatgagtattcaacatttccgtgtcgcccttattcccttttttgcggcattttgccttcctgtttttgctcacccagaaacgctggtgaaagtaaaagatgctgaagatcagttgggtgcacgagtgggttacatcgaactggatctcaacagcggtaagatccttgagagttttcgccccgaagaacgttttccaatgatgagcacttttaaagttctgctatgtggcgcggtattatcccgtattgacgccgggcaagagcaactcggtcgccgcatacactattctcagaatgacttggttgagtactcaccagtcacagaaaagcatcttacggatggcatgacagtaagagaattatgcagtgctgccataaccatgagtgataacactgcggccaacttacttctgacaacgatcggaggaccgaaggagctaaccgcttttttgcacaacatgggggatcatgtaactcgccttgatcgttgggaaccggagctgaatgaagccataccaaacgacgagcgtgacaccacgatgcctgtagcaatggcaacaacgttgcgcaaactattaactggcgaactacttactctagcttcccggcaacaattaatagactggatggaggcggataaagttgcaggaccacttctgcgctcggcccttccggctggctggtttattgctgataaatctggagccggtgagcgtggttctcgcggtatcattgcagcactggggccagatggtaagccctcccgtatcgtagttatctacacgacggggagtcaggcaactatggatgaacgaaatagacagatcgctgagataggtgcctcactgattaagcattggtaatgtctaacaattcgttcaagccgacgccgcttcgcggcgcggcttaactcaagcgttagatgctgcaggcatcgtggtgtcacgctcgtcgtttggtatggcttcattcagctccggttcccaacgatcaaggcgagttacatgatcccccatgttgtgcaaaaaagcggttagctccttcggtcctccgatcgaggatttttcggcgctgcgctacgtccgcgaccgcgttgagggatcaagccacagcagcccactcgaccttctagccgacccagacgagccaagggatctttttggaatgctgctccgtcgtcaggctttccgacgtttgggtggttgaacagaagtcattatcgcacggaatgccaagcactcccgaggggaaccctgtggttggcatgcacatacaaatggacgaacggataaaccttttcacgcccttttaaatatccgattattctaataaacgctcttttctcttaggtttacccgccaatatatcctgtcaaacactgatagtttaaactgaaggcgggaaacgacaatctcctaggttaggattttttttcacgaaattgcttcttgaaattacgtgatggattttgattctgatttatcttgtgattgttgactctacagatgcagatcttcgtcaagaccctcaccggaaagaccatcacccttgaggtggaaagctctgacaccatcgacaacgtcaaggccaagatccaggacaaggaaggaattcccccggatcagcaacgtctcatcttcgccggaaagcagctcgaggacggccgtaccctcgccgactacaacatccagaaggagtcaacccttcaccttgtccttcgtctccgtggtggcatgcagatcttcgtcaagactctcactggcaaaaccataaccctagaggtcgaaagctctgacaccattgacaacgtcaaggccaagatccaggacaaggagggaatccccccagaccagcaacgtctcatcttcgccggaaagcaacttgaggacgggcgcaccctcgccgactacaacatccagaaggaatcaacccttcacctcgtcctccgtctccgtggtggcatgcagatcttcgttaagaccctcaccggcaagactataaccctagaagtcgagagctccgacaccatcgacaacgtcaaggctaagatccaggacaaggagggtatccccccagaccagcagaggctgatcttcgccggcaagcagctcgaggacggacgtacccttgctgactacaacatccagaaggagtcaactctccacttggtgttgcgtcttcgtggtggtatgcagatcttcgtcaagacccttacgggtaagactattaccctcgaggtggagagctccgacaccattgacaatgtgaaggcgaagatccaggacaaggaaggaatcccaccggaccagcagaggcttatttttgctggcaaacagctagaggatggaaggaccctcgctgactacaacatccagaaggagtcaactctgcacttggtgttgcgtcttcgtggggggttttcaaatgctgctgatgaagtggcaactcaattactgaattttgacctcttgaagcttgccggtgatgttgagtctaaccctggaccaatggcgcaagttagcagaatctgcaatggtgtgcagaacccatctcttatctccaatctctcgaaatccagtcaacgcaaatctcccttatcggtttctctgaagacgcagcagcatccacgagcttatccgatttcgtcgtcgtggggattgaagaagagtgggatgacgttaattggctctgagcttcgtcctcttaaggtcatgtcttctgtttccacggcgtgcatgggggaagcggtgatcgccgaagtatcgactcaactatcagaggtagttggcgtcatcgagcgccatctcgaaccgacgttgctggccgtacatttgtacggctccgcagtggatggcggcctgaagccacacagtgatattgatttgctggttacggtgaccgtaaggcttgatgaaacaacgcggcgagctttgatcaacgaccttttggaaacttcggcttcccctggagagagcgagattctccgcgctgtagaagtcaccattgttgtgcacgacgacatcattccgtggcgttatccagctaagcgcgaactgcaatttggagaatggcagcgcaatgacattcttgcaggtatcttcgagccagccacgatcgacattgatctggctatcttgctgacaaaagcaagagaacatagcgttgccttggtaggtccagcggcggaggaactctttgatccggttcctgaacaggatctatttgaggcgctaaatgaaaccttaacgctatggaactcgccgcccgactgggctggcgatgagcgaaatgtagtgcttacgttgtcccgcatttggtacagcgcagtaaccggcaaaatcgcgccgaaggatgtcgctgccgactgggcaatggagcgcctgccggcccagtatcagcccgtcatacttgaagctagacaggcttatcttggacaagaagaagatcgcttggcctcgcgcgcagatcagttggaagaatttgtccactacgtgaaaggcgagatcaccaaggtagtcggcaaataagctggagctgatgtctgtgtgatgtctgatgttggattttcccagacattttaagaagaaatgtgatgtgtaatgggtctgtaatgacctttgaaaataagtttggtttgtgttgaactctattgtcccattaatgttactactgtttgttatcaatttgtggagctgatatataattatcaactgtatgctggcatattgtgtttgaattttgttctcaatccagtgaattggcgtatattagtgggttttttattcttcatgcttatcacggaggaaaagcagggatgagttgtgtgaaggatggtgatcatcccacgaattattagattttggtattataggttaaagatatttattaggtagggagaactcttggattagattctaaagtgatattttgaaaacacaccaaaggatttttgaacaaacggagatcatgatccctagtttcaattagctgccccttaccaagaggtagcaacttaaaaattatgctcgtgaagcatatttggtatcgtatataaattatgtaagcaatctgcttcagttggaacattaattggcttgcggaatgcacatttagatgatccacacaggtccacataaaaattcctaatcaattttagttatgcaatctttctgcttcaggtagtccttgtcttacagaaagcacattgagatgatccccacacagatccacataaaaaattcctaatcaataataacttgaaaatcattaaaagatgtaatgccatactaatccctaatttttgtgcaagtttttgtatactggaccccaaaaaataccaaaaagaaaaaacaagttattcagtgatatttttctgctccaatataaatttgattaccaaataccaaaaaataaaaacactattcagtggtatttttctgctccaatactggaccccaaattaatcagaatcggatccgtttaacagataaaaacaaaagcgatcgggttaaaatcccatttttacaaataacaacgcaggtttatacatgaaacaaatgtcattacctaggctggcagcacatcccccgttcgcgagctggcgtaacagcgaagaggcccgggcgcgccactgttaataatttttaaacgtcagcgcactaaaaaaacgaaaagacggacacgtgaaaataaaaaacacacactagtttatgacgcaatactattttacttatgatttgggtacattagacaaaaccgtgaaagagatgtatcagctatgaaacctgtatacttcaatacagagacttactcatatcggatacgtacgcacgaagtatcatattaattattttaatttttaataaatattttatcggatacttatgtgatactctacatatacacaaggatatttctaagatactttatagatacgtatcctagaaaaacatgaagagtaaaaaagtgagacaatgttgtaaaaattcattataaatgtatatgattcaattttagatatgcatcagtataattgattctcgatgaaacacttaaaattatatttcttgtggaagaacgtagcgagagaggtgattcagttagacaacattaaataaaattaatgttaagttcttttaatgatgtttctctcaatatcacatcatatgaaaatgtaatatgatttataagaaaatttttaaaaaatttattttaataatcacatgtactattttttaaaaattgtatcttttataataatacaataataaagagtaatcagtgttaatttttcttcaaatataagttttattataaatcattgttaacgtatcataagtcattaccgtatcgtatcttaatttttttttaaaaaccgctaattcacgtacccgtattgtattgtacccgcacctgtatcacaatcgatcttagttagaagaattgtctcgaggcggtgcaagacagcatataatagacgtggactctcttataccaaacgttgtcgtatcacaaagggttaggtaacaagtcacagtttgtccacgtgtcacgttttaattggaagaggtgccgttggcgtaatataacagccaatcgatttttgctataaaagcaaatcaggtaaactaaacttcttcattcttttcttccccatcgctacaaaaccggttcctttggaaaagagattcattcaaacctagcacccaattccgtttcaaggtataatctactttctattcttcgattattttattattattagctactatcgtttaatcgatcttttcttttgatccgtcaaatttaaattcaattagggttttgttcttttctttcatctgattgaaatccttctgaattgaaccgtttacttgattttactgtttattgtatgatttaatcctttgtttttcaaagacagtctttagattgtgattaggggttcatataaatttttagatttggatttttgtattgtatgattcaaaaaatacgtcctttaattagattagtacatggatattttttacccgatttattgattgtcagggagaatttgatgagcaagtttttttgatgtctgttgtaaattgaattgattataattgctgatctgctgcttccagttttcataacccatattcttttaaccttgttgtacacacaatgaaaaattggtgattgattcatttgtttttctttgttttggattatacagggtatggcgccgccgcctgccctccctccaaagaggcgaagaagtggtggatcttccggggggtccccccctcctgctttacctccaaaaagacgtcgttctggtggttcaagtggaggttctccacctcctgcacttcctcccaagagaagaaggagcggcggcagctcaggaggatcaccaccaccagctttgccacccaaaaggcgccggggctcctccgagacaccaggcacctccgagagcgcgacgcccgagggcggctccggcggctccggcagctccaagctggagaagtttacaaactgttacagcctctccaaaaccctcaggtttaaagcgatcccggtgggcaagacccaggagaacatcgacaacaagaggctcctggtggaagacgagaagcgcgccgaagactacaagggcgtgaagaagctgctcgataggtactacctcagctttattaacgacgtgctgcacagcatcaaactcaagaatctcaacaactacatctccctcttccgcaaaaagacccgcaccgagaaggagaacaaggagctggagaacctggagatcaacctccgcaaggaaatcgccaaagcgttcaagggcaatgaagggtacaagagcctcttcaagaaagacatcatcgaaactatcctcccagagtttctcgatgacaaggacgagatcgcgctggtgaactcctttaacgggttcacaaccgcgtttaccggcttctttgataacagggaaaatatgttctccgaggaggccaagtccaccagcatcgccttcaggtgtatcaacgagaacctcacccgctacatttccaatatggacattttcgagaaggtggatgcgatcttcgataagcacgaggtgcaggagatcaaagagaagattctcaattccgattatgacgtcgaggatttcttcgaaggggagttctttaattttgtgctcacacaagagggcattgacgtgtacaacgcgattatcgggggcttcgtcacagagtccggggagaagattaaggggctgaatgagtacatcaatctgtacaatcagaagaccaagcagaaactgccgaaattcaagccgctctacaagcaagtcctgtccgatagggaaagcctctccttctacggcgagggctataccagcgacgaggaggtgctggaagtcttccgcaacacactgaataagaatagcgagattttctcctccatcaagaagctcgagaagctctttaagaactttgacgagtacagctccgccgggattttcgtgaagaacgggccggcgatcagcaccatctccaaggacatctttggcgagtggaacgtcatcagggacaagtggaacgccgagtacgacgacatccacctgaagaagaaggcggtggtgaccgagaagtatgaggacgatcgcaggaagtccttcaaaaaaatcggctccttcagcctcgaacagctccaggagtatgccgatgcggatctgtccgtcgtcgagaagctgaaggaaatcatcattcagaaggtcgacgagatctataaagtgtacgggtccagcgagaagctgttcgacgccgactttgtgctcgagaagtccctcaaaaagaatgacgccgtggtggccattatgaaagacctgctcgactccgtgaagtccttcgaaaattacattaaagcgttctttggggaggggaaggaaactaacagggatgagtccttctatggcgactttgtcctcgcgtacgacatcctgctgaaggtcgaccacatttacgacgcgatccgcaactacgtgacacagaagccgtactccaaagacaagttcaagctgtacttccagaacccgcaatttatggggggctgggacaaggataaagagacagactaccgcgcgacaattctccgctatggctccaaatactatctggccatcatggacaagaagtacgcgaagtgcctgcagaagatcgacaaagacgacgtcaatggcaactatgaaaagatcaactacaagctgctgccgggtccgaacaagatgctcccgaaggtgttcttcagcaagaagtggatggcctactacaatccaagcgaggatattcagaaaatctataaaaacgggaccttcaagaagggggacatgtttaacctcaacgactgccacaagctcattgatttcttcaaggatagcatttcccgctacccgaaatggtccaatgcgtacgattttaacttctccgagacagaaaagtacaaagacatcgcgggcttttacagggaggtggaggagcaagggtataaagtttcttttgaatccgcgagcaagaaggaagtcgacaagctcgtcgaggagggcaagctctacatgttccaaatttataacaaggacttttccgacaagagccatgggaccccaaacctccacaccatgtacttcaaactgctctttgacgagaacaaccacgggcaaatcaggctgagcggcggcgccgaattattcatgcgcagggcctccctcaagaaggaagagctggtcgtccatccagccaattccccgatcgcgaacaagaacccggacaatccgaaaaagaccaccaccctgtcctacgacgtctacaaggacaaacgcttcagcgaagaccagtacgaattacacatcccaattgcgattaataagtgcccaaagaatatcttcaaaattaatacagaggtcagggtgctgctcaaacacgacgacaatccgtatgtcatcggcattgacaggggcgagcgcaatctgctctatatcgtggtcgtggatgggaagggcaatattgtggagcagtactccctgaacgagattatcaacaacttcaatgggattaggattaagaccgactatcacagcctgctcgacaagaaagaaaaagagaggtttgaggcccgccaaaactggacctccattgagaatatcaaagaattaaaggccggctatatttcccaagtcgtccacaagatctgcgagctggtggagaaatatgacgccgtgattgcgctcgaagacttaaattctgggttcaagaactcccgcgtgaaggtggaaaaacaggtgtatcagaaattcgagaaaatgctgatcgacaaactcaattatatggtggataagaagtccaacccgtgtgccacagggggcgcgctgaagggctatcagatcaccaacaagttcgagagcttcaagagcatgagcacccagaacgggtttattttctacatcccggcgtggctcacctccaagattgacccgagcaccggcttcgtgaacctcctgaagacaaagtatacctccattgccgacagcaagaagtttatctcctccttcgaccgcattatgtatgtgccggaggaggacctcttcgagttcgccctcgactacaaaaacttcagccgcacagatgcggattacatcaagaagtggaagctgtactcctacgggaacaggatccgcatcttcaggaatccaaaaaaaaataacgtctttgactgggaggaagtgtgcctgacatccgcctacaaggaactgttcaataaatacggcatcaattaccagcagggcgacattcgcgccctcctctgtgagcagtccgacaaagcgttttactccagcttcatggccctcatgtccctgatgctccaaatgaggaatagcatcacagggcgcaccgacgtcgacttcctcatcagcccggtgaagaactccgacgggatcttttacgactcccgcaactatgaggcgcaagagaatgcgatcctcccgaagaacgccgatgcgaacggggcctataatatcgccaggaaagtgctctgggccatcgggcagttcaaaaaggcggaggatgagaagctcgacaaggtgaaaattgccatttccaacaaggagtggctggagtacgcgcagacctccgtgaagcactgaaagggctctctgtcatgatttcatactttcattattgagctctgtaattacaattatgaccatgagaacatctcttattgtgtggccttttaattgctgatgttagtactgaaccaaagcttatcgtgatgatgtaaaagcaataagtacttgtttgtagcttctttgtgtctccctttgggcttaatacatctgtttagtgttgtggctttggcatagacttctcttggtaataatgccttgcaatgcaaaatttcaattatcaaattctattatgttctcaccttatggtaacagcttaccctgtggaagatgagattcttgagttgagtcattgccaatttttggcattagcttttgaattagtgaattttgacaaaaattaccgtgacactgattttgttgaagctcttaagtgtagtttttacaaaatttcagtggctcgttgtgattatgtcaaactcacggcgaatgtagttcttacagaatttcagtggctccctgcaggctcgaggtcattcatatgcttgagaagagagtcgggatagtccaaaataaaacaaaggtaagattacctggtcaaaagtgaaaacatcagttaaaaggtggtataaagtaaaatatcggtaataaaaggtggcccaaagtgaaatttactcttttctactattataaaaattgaggatgtttttgtcggtactttgatacgtcatttttgtatgaattggtttttaagtttattcgcttttggaaatgcatatctgtatttgagtcgggttttaagttcgtttgcttttgtaaatacagagggatttgtataagaaatatctttagaaaaacccatatgctaatttgacataatttttgagaaaaatatatattcaggcgaattctcacaatgaacaataataagattaaaatagctttcccccgttgcagcgcatgggtattttttctagtaaaaataaaagataaacttagactcaaaacatttacaaaaacaacccctaaagttcctaaagcccaaagtgctatccacgatccatagcaagcccagcccaacccaacccaacccaacccaccccagtccagccaactggacaatagtctccacacccccccactatcaccgtgagttgtccgcacgcaccgcacgtctcgcagccaaaaaaaaaaagaaagaaaaaaaagaaaaagaaaaaacagcaggtgggtccgggtcgtgggggccggaaacgcgaggaggatcgcgagccagcgacgaggagcttaggcctcatcgttgaagatgcctctgccgacagtggtcccaaagatggacccccacccacgaggagcatcgtggaaaaagaagacgttccaaccacgtcttcaaagcaagtggattgatgtgatatctccactgacgtaagggatgacgcacaatcccactatccttcgaggcctcatcgttgaagatgcctctgccgacagtggtcccaaagatggacccccacccacgaggagcatcgtggaaaaagaagacgttccaaccacgtcttcaaagcaagtggattgatgtgatatctccactgacgtaagggatgacgcacaatcccactatccttcgaagctccctccctccgcttccaaagaaacgccccccatcgccactatatacatacccccccctctcctcccatccccccaacccttctagaaccatcttccacacactcaagccacactattggagaacacacagggacaacacaccataagatccaagggaggcctccgccgccgccggtaaccaccccgcccctctcctctttctttctccgtttttttttccgtctcggtctcgatctttggccttggtagtttgggtgggcgagaggcggcttcgtgcgcgcccagatcggtgcgcgggaggggcgggatctcgcggctggggctctcgccggcgtggatccggcccggatctcgcggggaatggggctctcggatgtagatctgcgatccgccgttgttgggggagatgatggggggtttaaaatttccgccgtgctaaacaagatcaggaagaggggaaaagggcactatggtttatatttttatatatttctgctgcttcgtcaggcttagatgtgctagatctttctttcttctttttgtgggtagaatttgaatccctcagcattgttcatcggtagtttttcttttcatgatttgtgacaaatgcagcctcgtgcggagcttttttgtaggtagaaggcggccgcatggcccagtctaagcacgggttgacgaaggagatgactatgaagtatcgcatggaaggctgcgttgacggccacaaattcgtcattaccggcgagggcatcggctacccctttaaggtaagtttctgcttctacctttgatatatatataataattatcattaattagtagtaatataatatttcaaatatttttttcaaaataaaagaatgtagtatatagcaattgcttttctgtagtttataagtgtgtatattttaatttataacttttctaatatatgaccaaaatttgttgatgtgcagggcaagcaagcgataaacctgtgcgtggtggagggtggccctctgcccttcgccgaggatatactctcagccgccttcatgtacgggaatcgggtgttcacggagtacccgcaagacatcgtggactacttcaagaactcctgccccgccggatacacatgggaccgttccttcctcttcgaggacggagccgtttgcatctgcaacgcggacatcaccgtgtccgtcgaggagaactgcatgtaccacgagtcaaagttctatggagtgaacttcccggccgatggtcccgtgatgaagaaaatgacggacaactgggagccgtcgtgcgagaaaatcattcccgtcccaaaacagggaatcctcaagggcgacgtgtcgatgtacctacttctcaaggacggtggacggctacggtgccagttcgacactgtttacaaggcgaagtcggtgccgaggaagatgccggactggcactttatccagcacaagctgacaagggaggacagaagcgacgctaagaaccagaaatggcacctcaccgagcacgccatcgccagtggctctgcgctgcccgggtgaccctgcaatgtgaccctagacttgtccatcttctggattggccaacttaattaatgtatgaaataaaaggatgcacacatagtgacatgctaatcactataatgtgggcatcaaagttgtgtgttatgtgtaattactaattatctgaataagagaaagagatcatccatatttcttatcctaaatgaatgtcacgtgtctttataattctttgatgaaccagatgcattttattaaccaattccatatacatataaatattaatcatatataattaatatcaattgggttagcaaaacaaatctagtctaggtgtgttttgctaattattgggggatagtgcaaaaagaaatctacgttctcaataattcagatagaaaacttaataaagtgagataatttacatagattgcttttatcctttgatatatgtgaaaccatgcatgatataaggaaaatagatagagaaataattttttacatcgttgaatatgtaaacaatttaattcaagaagctaggaatataaatattgaggagtttatgattattattattattttgatgttcaatgaagttttttttaatttcatatgaagtatacaaaaattcttcatagatttttgtttctatgccgtagttatctttaatatatttgtggttgaagaaatttattgctagaaacgaatggattgtcaatttttttttaaagcaaatatatatgaaattatactgtatattattttagtcatgattaaaatgtggccttaattgaatcatctttctcattcattttttcaaaagcatatcaggatgattgatatttatctattttaaaaattaatttaagggttcaaattaaatttaacttaaaagtgtcctaaccgtagttaaaggtttactttaaaaaaatactatgaaaaatctaatcttctatgaatcgagggcccttagctagttag

SEQ ID NO: 94 - DNA, 19080 bp, synthetic construct
  misc_feature 1..19080: note = pWISE3768 Full plasmid sequence
  source 1..19080: mol_type = other DNA
aagcttcgataaaaatgttttaaacgatatatattataaaaaaaaacgtttcaaaaataaatacaaaaatgtttttaaatatatataatttaactcattaaagaaaataaaaatgcaagtgcggtgacaagacaagctaaaagttgcaaaagaaatggcagggctataaggctcacctactcctggatttaccaaattttggttcgtccctatactcgaaaaataaaacaaaataaatttcagtatcttcgtttttgtatgctttgactgtgaggcgaggccaactttcttcttctgtctgagatgaattttgtttgcctcctgtgaaggatgtatcattcaaagtgaatgttttgcaactgccagtagtcccacatcgaccaaatattcttattacagtgtgtttatatagcacctggagaaggaatgggttgtttcaaagattaaataatttctactaagtgtagattgtgtgatgttcgatgttggatttaatttctactaagtgtagattttttttactagtgatatccgtcgactggtacctacgcgtagctagcccgtgaagtttctcatctaagcccccatttggacgtgaatgtagacacgtcgaaataaagatttccgaattagaataatttgtttattgctttcgcctataaatacgacggatcgtaatttgtcgttttatcaaaatgtactttcattttataataacgctgcggacatctacatttttgaattgaaaaaaaattggtaattactctttctttttctccatattgaccatcatactcattgctgatccatgtagatttcccggacatgaagccatttacaattgaatatatcctgccgccgctgccgctttgcacccggtggagcttgcatgttggtttctacgcagaactgagccggttaggcagataatttccattgagaactgagccatgtgcaccttccccccaacacggtgagcgacggggcaacggagtgatccacatgggacttttcctagcttggctgccatttttggggtgaggccgttcgcggccgaggggcgcagcccctggggggatgggaggcccgcgttagcgggccgggagggttcgagaagggggggcaccccccttcggcgtgcgcggtcacgcgcacagggcgcagccctggttaaaaacaaggtttataaatattggtttaaaagcaggttaaaagacaggttagcggtggccgaaaaacgggcggaaacccttgcaaatgctggattttctgcctgtggacagcccctcaaatgtcaataggtgcgcccctcatctgtcagcactctgcccctcaagtgtcaaggatcgcgcccctcatctgtcagtagtcgcgcccctcaagtgtcaataccgcagggcacttatccccaggcttgtccacatcatctgtgggaaactcgcgtaaaatcaggcgttttcgccgatttgcgaggctggccagctccacgtcgccggccgaaatcgagcctgcccctcatctgtcaacgccgcgccgggtgagtcggcccctcaagtgtcaacgtccgcccctcatctgtcagtgagggccaagttttccgcgaggtatccacaacgccggcggccggccgcggtgtctcgcacacggcttcgacggcgtttctggcgcgtttgcagggccatagacggccgccagcccagcggcgagggcaaccagcccggtgagcgtcggaaagggtcgatcgaccgatgcccttgagagccttcaacccagtcagctccttccggtgggcgcggggcatgactatcgtcgccgcacttatgactgtcttctttatcatgcaactcgtaggacaggtgccggcagcgctctgggtcattttcggcgaggaccgctttcgctggagcgcgacgatgatcggcctgtcgcttgcggtattcggaatcttgcacgccctcgctcaagccttcgtcactggtcccgccaccaaacgtttcggcgagaagcaggccattatcgccggcatggcggccgacgcgctgggctacgtcttgctggcgttcgcgacgcgaggctggatggccttccccattatgattcttctcgcttccggcggcatcgggatgcccgcgttgcaggccatgctgtccaggcaggtagatgacgaccatcagggacagcttcaaggatcgctcgcggctcttaccagcctaacttcgatcattggaccgctgatcgtcacggcgatttatgccgcctcggcgagcacatggaacgggttggcatggattgtaggcgccgccctataccttgtctgcctccccgcgttgcgtcgcggtgcatggagccgggccacctcgacctgaatggaagccggcggcacctcgctaacggattcaccactccaagaattggagccaatcaattcttgcggagaactgtgaatgcgcaaaccaacccttggcagaacatatccatcgcgtccgccatctccagcagccgcacgcggcgcatctcgggcagcgttgggtcctggccacgggtgcgcatgatcgtgctcctgtcgttgaggacccggctaggctggcggggttgccttactggttagcagaatgaatcaccgatacgcgagcgaacgtgaagcgactgctgctgcaaaacgtctgcgacctgagcaacaacatgaatggtcttcggtttccgtgtttcgtaaagtctggaaacgcggaagtcagcgccctgcaccattatgttccggatctgcatcgcaggatgctgctggctaccctgtggaacacctacatctgtattaacgaagcgctggcattgaccctgagtgatttttctctggtcccgccgcatccataccgccagttgtttaccctcacaacgttccagtaaccgggcatgttcatcatcagtaacccgtatcgtgagcatcctctctcgtttcatcggtatcattacccccatgaacagaaatcccccttacacggaggcatcagtgaccaaacaggaaaaaaccgcccttaacatggcccgctttatcagaagccagacattaacgcttctggagaaactcaacgagctggacgcggatgaacaggcagacatctgtgaatcgcttcacgaccacgctgatgagctttaccgcagctgcctcgcgcgtttcggtgatgacggtgaaaacctctgacacatgcagctcccggagacggtcacagcttgtctgtaagcggatgccgggagcagacaagcccgtcagggcgcgtcagcgggtgttggcgggtgtcggggcgcagccatgacccagtcacgtagcgatagcggagtgtatactggcttaactatgcggcatcagagcagattgtactgagagtgcaccatatgcggtgtgaaataccgcacagatgcgtaaggagaaaataccgcatcaggcgctcttccgcttcctcgctcactgactcgctgcgctcggtcgttcggctgcggcgagcggtatcagctcactcaaaggcggtaatacggttatccacagaatcaggggataacgcaggaaagaacatgtgagcaaaaggccagcaaaaggccaggaaccgtaaaaaggccgcgttgctggcgtttttccataggctccgcccccctgacgagcatcacaaaaatcgacgctcaagtcagaggtggcgaaacccgacaggactataaagataccaggcgtttccccctggaagctccctcgtgcgctctcctgttccgaccctgccgcttaccggatacctgtccgcctttctcccttcgggaagcgtggcgctttctcatagctcacgctgtaggtatctcagttcggtgtaggtcgttcgctccaagctgggctgtgtgcacgaaccccccgttcagcccgaccgctgcgccttatccggtaactatcgtcttgagtccaacccggtaagacacgacttatcgccactggcagcagccactggtaacaggattagcagagcgaggtatgtaggcggtgctacagagttcttgaagtggtggcctaactacggctacactagaaggacagtatttggtatctgcgctctgctgaagccagttaccttcggaaaaagagttggtagctcttgatccggcaaacaaaccaccgctggtagcggtggtttttttgtttgcaagcagcagattacgcgcagaaaaaaaggatctcaagaagatcctttgatcttttctacggggtctgacgctcagtggaacgaaaactcacgttaagggattttggtcatgagattatcaaaaaggatcttcacctagatccttttaaattaaaaatgaagttttaaatcaatctaaagtatatatgagtaaacttggtctgacagttaccaatgcttaatcagtgaggcacctatctcagcgatctgtctatttcgttcatccatagttgcctgactccccgtcgtgtagataactacgatacgggagggcttaccatctggccccagtgctgcaatgataccgcgagacccacgctcaccggctccagatttatcagcaataaaccagccagccggaagggccgagcgcagaagtggtcctgcaactttatccgcctccatccagtctattaattgttgccgggaagctagagtaagtagttcgccagttaatagtttgcgcaacgttgttgccattgctgcaggtcgggagcacaggatgacgcctaacaattcattcaagccgacaccgcttcgcggcgcggcttaattcaggagttaaacatcatgagtattcaacatttccgtgtcgcccttattcccttttttgcggcattttgccttcctgtttttgctcacccagaaacgctggtgaaagtaaaagatgctgaagatcagttgggtgcacgagtgggttacatcgaactggatctcaacagcggtaagatccttgagagttttcgccccgaagaacgttttccaatgatgagcacttttaaagttctgctatgtggcgcggtattatcccgtattgacgccgggcaagagcaactcggtcgccgcatacactattctcagaatgacttggttgagtactcaccagtcacagaaaagcatcttacggatggcatgacagtaagagaattatgcagtgctgccataaccatgagtgataacactgcggccaacttacttctgacaacgatcggaggaccgaaggagctaaccgcttttttgcacaacatgggggatcatgtaactcgccttgatcgttgggaaccggagctgaatgaagccataccaaacgacgagcgtgacaccacgatgcctgtagcaatggcaacaacgttgcgcaaactattaactggcgaactacttactctagcttcccggcaacaattaatagactggatggaggcggataaagttgcaggaccacttctgcgctcggcccttccggctggctggtttattgctgataaatctggagccggtgagcgtggttctcgcggtatcattgcagcactggggccagatggtaagccctcccgtatcgtagttatctacacgacggggagtcaggcaactatggatgaacgaaatagacagatcgctgagataggtgcctcactgattaagcattggtaatgtctaacaattcgttcaagccgacgccgcttcgcggcgcggcttaactcaagcgttagatgctgcaggcatcgtggtgtcacgctcgtcgtttggtatggcttcattcagctccggttcccaacgatcaaggcgagttacatgatcccccatgttgtgcaaaaaagcggttagctccttcggtcctccgatcgaggatttttcggcgctgcgctacgtccgcgaccgcgttgagggatcaagccacagcagcccactcgaccttctagccgacccagacgagccaagggatctttttggaatgctgctccgtcgtcaggctttccgacgtttgggtggttgaacagaagtcattatcgcacggaatgccaagcactcccgaggggaaccctgtggttggcatgcacatacaaatggacgaacggataaaccttttcacgcccttttaaatatccgattattctaataaacgctcttttctcttaggtttacccgccaatatatcctgtcaaacactgatagtttaaactgaaggcgggaaacgacaatctcctaggtaatgacatttgtttcatgtataaacctgcgttgttatttgtaaaaatgggattttaacccgatcgcttttgtttttatctgttaaacggatccgattctgattaatttggggtccagtattggagcagaaaaataccactgaatagtgtttttattttttggtatttggtaatcaaatttatattggagcagaaaaatatcactgaataacttgttttttctttttggtattttttggggtccagtatacaaaaacttgcacaaaaattagggattagtatggcattacatcttttaatgattttcaagttattattgattaggaattttttatgtggatctgtgtggggatcatctcaatgtgctttctgtaagacaaggactacctgaagcagaaagattgcataactaaaattgattaggaatttttatgtggacctgtgtggatcatctaaatgtgcattccgcaagccaattaatgttccaactgaagcagattgcttacataatttatatacgataccaaatatgcttcacgagcataatttttaagttgctacctcttggtaaggggcagctaattgaaactagggatcatgatctccgtttgttcaaaaatcctttggtgtgttttcaaaatatcactttagaatctaatccaagagttctccctacctaataaatatctttaacctataataccaaaatctaataattcgtgggatgatcaccatccttcacacaactcatccctgcttttcctccgtgataagcatgaagaataaaaaacccactaatatacgccaattcactggattgagaacaaaattcaaacacaatatgccagcatacagttgataattatatatcagctccacaaattgataacaaacagtagtaacattaatgggacaatagagttcaacacaaaccaaacttattttcaaaggtcattacagacccattacacatcacatttcttcttaaaatgtctgggaaaatccaacatcagacatcacacagacatcagctccagcttatttgccgactaccttggtgatctcgcctttcacgtagtggacaaattcttccaactgatctgcgcgcgaggccaagcgatcttcttcttgtccaagataagcctgtctagcttcaagtatgacgggctgatactgggccggcaggcgctccattgcccagtcggcagcgacatccttcggcgcgattttgccggttactgcgctgtaccaaatgcgggacaacgtaagcactacatttcgctcatcgccagcccagtcgggcggcgagttccatagcgttaaggtttcatttagcgcctcaaatagatcctgttcaggaaccggatcaaagagttcctccgccgctggacctaccaaggcaacgctatgttctcttgcttttgtcagcaagatagccagatcaatgtcgatcgtggctggctcgaagatacctgcaagaatgtcattgcgctgccattctccaaattgcagttcgcgcttagctggataacgccacggaatgatgtcgtcgtgcacaacaatggtgacttctacagcgcggagaatctcgctctctccaggggaagccgaagtttccaaaaggtcgttgatcaaagctcgccgcgttgtttcatcaagccttacggtcaccgtaaccagcaaatcaatatcactgtgtggcttcaggccgccatccactgcggagccgtacaaatgtacggccagcaacgtcggttcgagatggcgctcgatgacgccaactacctctgatagttgagtcgatacttcggcgatcaccgcttcccccatgcacgccgtggaaacagaagacatgaccttaagaggacgaagctcagagccaattaacgtcatcccactcttcttcaatccccacgacgacgaaatcggataagctcgtggatgctgctgcgtcttcagagaaaccgataagggagatttgcgttgactggatttcgagagattggagataagagatgggttctgcacaccattgcagattctgctaacttgcgccattggtccagggttagactcaacatcaccggcaagcttcaagaggtcaaaattcagtaattgagttgccacttcatcagcagcatttgaaaaccccccacgaagacgcaacaccaagtgcagagttgactccttctggatgttgtagtcagcgagggtccttccatcctctagctgtttgccagcaaaaataagcctctgctggtccggtgggattccttccttgtcctggatcttcgccttcacattgtcaatggtgtcggagctctccacctcgagggtaatagtcttacccgtaagggtcttgacgaagatctgcataccaccacgaagacgcaacaccaagtggagagttgactccttctggatgttgtagtcagcaagggtacgtccgtcctcgagctgcttgccggcgaagatcagcctctgctggtctggggggataccctccttgtcctggatcttagccttgacgttgtcgatggtgtcggagctctcgacttctagggttatagtcttgccggtgagggtcttaacgaagatctgcatgccaccacggagacggaggacgaggtgaagggttgattccttctggatgttgtagtcggcgagggtgcgcccgtcctcaagttgctttccggcgaagatgagacgttgctggtctggggggattccctccttgtcctggatcttggccttgacgttgtcaatggtgtcagagctttcgacctctagggttatggttttgccagtgagagtcttgacgaagatctgcatgccaccacggagacgaaggacaaggtgaagggttgactccttctggatgttgtagtcggcgagggtacggccgtcctcgagctgctttccggcgaagatgagacgttgctgatccgggggaattccttccttgtcctggatcttggccttgacgttgtcgatggtgtcagagctttccacctcaagggtgatggtctttccggtgagggtcttgacgaagatctgcatctgtagagtcaacaatcacaagataaatcagaatcaaaatccatcacgtaatttcaagaagcaatttcgtgaaaaaaaatcctaacctaggctggcagcacatcccccgttcgcgagctggcgtaacagcgaagaggcccgggcgcgccactgttaataatttttaaacgtcagcgcactaaaaaaacgaaaagacggacacgtgaaaataaaaaacacacactagtttatgacgcaatactattttacttatgatttgggtacattagacaaaaccgtgaaagagatgtatcagctatgaaacctgtatacttcaatacagagacttactcatatcggatacgtacgcacgaagtatcatattaattattttaatttttaataaatattttatcggatacttatgtgatactctacatatacacaaggatatttctaagatactttatagatacgtatcctagaaaaacatgaagagtaaaaaagtgagacaatgttgtaaaaattcattataaatgtatatgattcaattttagatatgcatcagtataattgattctcgatgaaacacttaaaattatatttcttgtggaagaacgtagcgagagaggtgattcagttagacaacattaaataaaattaatgttaagttcttttaatgatgtttctctcaatatcacatcatatgaaaatgtaatatgatttataagaaaatttttaaaaaatttattttaataatcacatgtactattttttaaaaattgtatcttttataataatacaataataaagagtaatcagtgttaatttttcttcaaatataagttttattataaatcattgttaacgtatcataagtcattaccgtatcgtatcttaatttttttttaaaaaccgctaattcacgtacccgtattgtattgtacccgcacctgtatcacaatcgatcttagttagaagaattgtctcgaggcggtgcaagacagcatataatagacgtggactctcttataccaaacgttgtcgtatcacaaagggttaggtaacaagtcacagtttgtccacgtgtcacgttttaattggaagaggtgccgttggcgtaatataacagccaatcgatttttgctataaaagcaaatcaggtaaactaaacttcttcattcttttcttccccatcgctacaaaaccggttcctttggaaaagagattcattcaaacctagcacccaattccgtttcaaggtataatctactttctattcttcgattattttattattattagctactatcgtttaatcgatcttttcttttgatccgtcaaatttaaattcaattagggttttgttcttttctttcatctgattgaaatccttctgaattgaaccgtttacttgattttactgtttattgtatgatttaatcctttgtttttcaaagacagtctttagattgtgattaggggttcatataaatttttagatttggatttttgtattgtatgattcaaaaaatacgtcctttaattagattagtacatggatattttttacccgatttattgattgtcagggagaatttgatgagcaagtttttttgatgtctgttgtaaattgaattgattataattgctgatctgctgcttccagttttcataacccatattcttttaaccttgttgtacacacaatgaaaaattggtgattgattcatttgtttttctttgttttggattatacagggtatggcgccgccgcctgccctccctccaaagaggcgaagaagtggtggatcttccggggggtccccccctcctgctttacctccaaaaagacgtcgttctggtggttcaagtggaggttctccacctcctgcacttcctcccaagagaagaaggagcggcggcagctcaggaggatcaccaccaccagctttgccacccaaaaggcgccggggctcctccgagacaccaggcacctccgagagcgcgacgcccgagggcggctccggcggctccggcagctccaagctggagaagtttacaaactgttacagcctctccaaaaccctcaggtttaaagcgatcccggtgggcaagacccaggagaacatcgacaacaagaggctcctggtggaagacgagaagcgcgccgaagactacaagggcgtgaagaagctgctcgataggtactacctcagctttattaacgacgtgctgcacagcatcaaactcaagaatctcaacaactacatctccctcttccgcaaaaagacccgcaccgagaaggagaacaaggagctggagaacctggagatcaacctccgcaaggaaatcgccaaagcgttcaagggcaatgaagggtacaagagcctcttcaagaaagacatcatcgaaactatcctcccagagtttctcgatgacaaggacgagatcgcgctggtgaactcctttaacgggttcacaaccgcgtttaccggcttctttgataacagggaaaatatgttctccgaggaggccaagtccaccagcatcgccttcaggtgtatcaacgagaacctcacccgctacatttccaatatggacattttcgagaaggtggatgcgatcttcgataagcacgaggtgcaggagatcaaagagaagattctcaattccgattatgacgtcgaggatttcttcgaaggggagttctttaattttgtgctcacacaagagggcattgacgtgtacaacgcgattatcgggggcttcgtcacagagtccggggagaagattaaggggctgaatgagtacatcaatctgtacaatcagaagaccaagcagaaactgccgaaattcaagccgctctacaagcaagtcctgtccgatagggaaagcctctccttctacggcgagggctataccagcgacgaggaggtgctggaagtcttccgcaacacactgaataagaatagcgagattttctcctccatcaagaagctcgagaagctctttaagaactttgacgagtacagctccgccgggattttcgtgaagaacgggccggcgatcagcaccatctccaaggacatctttggcgagtggaacgtcatcagggacaagtggaacgccgagtacgacgacatccacctgaagaagaaggcggtggtgaccgagaagtatgaggacgatcgcaggaagtccttcaaaaaaatcggctccttcagcctcgaacagctccaggagtatgccgatgcggatctgtccgtcgtcgagaagctgaaggaaatcatcattcagaaggtcgacgagatctataaagtgtacgggtccagcgagaagctgttcgacgccgactttgtgctcgagaagtccctcaaaaagaatgacgccgtggtggccattatgaaagacctgctcgactccgtgaagtccttcgaaaattacattaaagcgttctttggggaggggaaggaaactaacagggatgagtccttctatggcgactttgtcctcgcgtacgacatcctgctgaaggtcgaccacatttacgacgcgatccgcaactacgtgacacagaagccgtactccaaagacaagttcaagctgtacttccagaacccgcaatttatggggggctgggacaaggataaagagacagactaccgcgcgacaattctccgctatggctccaaatactatctggccatcatggacaagaagtacgcgaagtgcctgcagaagatcgacaaagacgacgtcaatggcaactatgaaaagatcaactacaagctgctgccgggtccgaacaagatgctcccgaaggtgttcttcagcaagaagtggatggcctactacaatccaagcgaggatattcagaaaatctataaaaacgggaccttcaagaagggggacatgtttaacctcaacgactgccacaagctcattgatttcttcaaggatagcatttcccgctacccgaaatggtccaatgcgtacgattttaacttctccgagacagaaaagtacaaagacatcgcgggcttttacagggaggtggaggagcaagggtataaagtttcttttgaatccgcgagcaagaaggaagtcgacaagctcgtcgaggagggcaagctctacatgttccaaatttataacaaggacttttccgacaagagccatgggaccccaaacctccacaccatgtacttcaaactgctctttgacgagaacaaccacgggcaaatcaggctgagcggcggcgccgaattattcatgcgcagggcctccctcaagaaggaagagctggtcgtccatccagccaattccccgatcgcgaacaagaacccggacaatccgaaaaagaccaccaccctgtcctacgacgtctacaaggacaaacgcttcagcgaagaccagtacgaattacacatcccaattgcgattaataagtgcccaaagaatatcttcaaaattaatacagaggtcagggtgctgctcaaacacgacgacaatccgtatgtcatcggcattgacaggggcgagcgcaatctgctctatatcgtggtcgtggatgggaagggcaatattgtggagcagtactccctgaacgagattatcaacaacttcaatgggattaggattaagaccgactatcacagcctgctcgacaagaaagaaaaagagaggtttgaggcccgccaaaactggacctccattgagaatatcaaagaattaaaggccggctatatttcccaagtcgtccacaagatctgcgagctggtggagaaatatgacgccgtgattgcgctcgaagacttaaattctgggttcaagaactcccgcgtgaaggtggaaaaacaggtgtatcagaaattcgagaaaatgctgatcgacaaactcaattatatggtggataagaagtccaacccgtgtgccacagggggcgcgctgaagggctatcagatcaccaacaagttcgagagcttcaagagcatgagcacccagaacgggtttattttctacatcccggcgtggctcacctccaagattgacccgagcaccggcttcgtgaacctcctgaagacaaagtatacctccattgccgacagcaagaagtttatctcctccttcgaccgcattatgtatgtgccggaggaggacctcttcgagttcgccctcgactacaaaaacttcagccgcacagatgcggattacatcaagaagtggaagctgtactcctacgggaacaggatccgcatcttcaggaatccaaaaaaaaataacgtctttgactgggaggaagtgtgcctgacatccgcctacaaggaactgttcaataaatacggcatcaattaccagcagggcgacattcgcgccctcctctgtgagcagtccgacaaagcgttttactccagcttcatggccctcatgtccctgatgctccaaatgaggaatagcatcacagggcgcaccgacgtcgacttcctcatcagcccggtgaagaactccgacgggatcttttacgactcccgcaactatgaggcgcaagagaatgcgatcctcccgaagaacgccgatgcgaacggggcctataatatcgccaggaaagtgctctgggccatcgggcagttcaaaaaggcggaggatgagaagctcgacaaggtgaaaattgccatttccaacaaggagtggctggagtacgcgcagacctccgtgaagcactgaaagggctctctgtcatgatttcatactttcattattgagctctgtaattacaattatgaccatgagaacatctcttattgtgtggccttttaattgctgatgttagtactgaaccaaagcttatcgtgatgatgtaaaagcaataagtacttgtttgtagcttctttgtgtctccctttgggcttaatacatctgtttagtgttgtggctttggcatagacttctcttggtaataatgccttgcaatgcaaaatttcaattatcaaattctattatgttctcaccttatggtaacagcttaccctgtggaagatgagattcttgagttgagtcattgccaatttttggcattagcttttgaattagtgaattttgacaaaaattaccgtgacactgattttgttgaagctcttaagtgtagtttttacaaaatttcagtggctcgttgtgattatgtcaaactcacggcgaatgtagttcttacagaatttcagtggctccctgcaggctcgaggtcattcatatgcttgagaagagagtcgggatagtccaaaataaaacaaaggtaagattacctggtcaaaagtgaaaacatcagttaaaaggtggtataaagtaaaatatcggtaataaaaggtggcccaaagtgaaatttactcttttctactattataaaaattgaggatgtttttgtcggtactttgatacgtcatttttgtatgaattggtttttaagtttattcgcttttggaaatgcatatctgtatttgagtcgggttttaagttcgtttgcttttgtaaatacagagggatttgtataagaaatatctttagaaaaacccatatgctaatttgacataatttttgagaaaaatatatattcaggcgaattctcacaatgaacaataataagattaaaatagctttcccccgttgcagcgcatgggtattttttctagtaaaaataaaagataaacttagactcaaaacatttacaaaaacaacccctaaagttcctaaagcccaaagtgctatccacgatccatagcaagcccagcccaacccaacccaacccaacccaccccagtccagccaactggacaatagtctccacacccccccactatcaccgtgagttgtccgcacgcaccgcacgtctcgcagccaaaaaaaaaaagaaagaaaaaaaagaaaaagaaaaaacagcaggtgggtccgggtcgtgggggccggaaacgcgaggaggatcgcgagccagcgacgaggagcttaggcctcatcgttgaagatgcctctgccgacagtggtcccaaagatggacccccacccacgaggagcatcgtggaaaaagaagacgttccaaccacgtcttcaaagcaagtggattgatgtgatatctccactgacgtaagggatgacgcacaatcccactatccttcgaggcctcatcgttgaagatgcctctgccgacagtggtcccaaagatggacccccacccacgaggagcatcgtggaaaaagaagacgttccaaccacgtcttcaaagcaagtggattgatgtgatatctccactgacgtaagggatgacgcacaatcccactatccttcgaagctccctccctccgcttccaaagaaacgccccccatcgccactatatacatacccccccctctcctcccatccccccaacccttctagaaccatcttccacacactcaagccacactattggagaacacacagggacaacacaccataagatccaagggaggcctccgccgccgccggtaaccaccccgcccctctcctctttctttctccgtttttttttccgtctcggtctcgatctttggccttggtagtttgggtgggcgagaggcggcttcgtgcgcgcccagatcggtgcgcgggaggggcgggatctcgcggctggggctctcgccggcgtggatccggcccggatctcgcggggaatggggctctcggatgtagatctgcgatccgccgttgttgggggagatgatggggggtttaaaatttccgccgtgctaaacaagatcaggaagaggggaaaagggcactatggtttatatttttatatatttctgctgcttcgtcaggcttagatgtgctagatctttctttcttctttttgtgggtagaatttgaatccctcagcattgttcatcggtagtttttcttttcatgatttgtgacaaatgcagcctcgtgcggagcttttttgtaggtagaaggcggccgcatggcccagtctaagcacgggttgacgaaggagatgactatgaagtatcgcatggaaggctgcgttgacggccacaaattcgtcattaccggcgagggcatcggctacccctttaaggtaagtttctgcttctacctttgatatatatataataattatcattaattagtagtaatataatatttcaaatatttttttcaaaataaaagaatgtagtatatagcaattgcttttctgtagtttataagtgtgtatattttaatttataacttttctaatatatgaccaaaatttgttgatgtgcagggcaagcaagcgataaacctgtgcgtggtggagggtggccctctgcccttcgccgaggatatactctcagccgccttcatgtacgggaatcgggtgttcacggagtacccgcaagacatcgtggactacttcaagaactcctgccccgccggatacacatgggaccgttccttcctcttcgaggacggagccgtttgcatctgcaacgcggacatcaccgtgtccgtcgaggagaactgcatgtaccacgagtcaaagttctatggagtgaacttcccggccgatggtcccgtgatgaagaaaatgacggacaactgggagccgtcgtgcgagaaaatcattcccgtcccaaaacagggaatcctcaagggcgacgtgtcgatgtacctacttctcaaggacggtggacggctacggtgccagttcgacactgtttacaaggcgaagtcggtgccgaggaagatgccggactggcactttatccagcacaagctgacaagggaggacagaagcgacgctaagaaccagaaatggcacctcaccgagcacgccatcgccagtggctctgcgctgcccgggtgaccctgcaatgtgaccctagacttgtccatcttctggattggccaacttaattaatgtatgaaataaaaggatgcacacatagtgacatgctaatcactataatgtgggcatcaaagttgtgtgttatgtgtaattactaattatctgaataagagaaagagatcatccatatttcttatcctaaatgaatgtcacgtgtctttataattctttgatgaaccagatgcattttattaaccaattccatatacatataaatattaatcatatataattaatatcaattgggttagcaaaacaaatctagtctaggtgtgttttgctaattattgggggatagtgcaaaaagaaatctacgttctcaataattcagatagaaaacttaataaagtgagataatttacatagattgcttttatcctttgatatatgtgaaaccatgcatgatataaggaaaatagatagagaaataattttttacatcgttgaatatgtaaacaatttaattcaagaagctaggaatataaatattgaggagtttatgattattattattattttgatgttcaatgaagttttttttaatttcatatgaagtatacaaaaattcttcatagatttttgtttctatgccgtagttatctttaatatatttgtggttgaagaaatttattgctagaaacgaatggattgtcaatttttttttaaagcaaatatatatgaaattatactgtatattattttagtcatgattaaaatgtggccttaattgaatcatctttctcattcattttttcaaaagcatatcaggatgattgatatttatctattttaaaaattaatttaagggttcaaattaaatttaacttaaaagtgtcctaaccgtagttaaaggtttactttaaaaaaatactatgaaaaatctaatcttctatgaatcgagggcccttagctagttag

SEQ ID NO: 95 - DNA, 18812 bp, synthetic construct
  misc_feature 1..18812: note = pWISE3788 Full plasmid sequence
  source 1..18812: mol_type = other DNA
agcttactagtcaacaattggccaatctttgttctaaattgctaataaacgaccatttccgtcaattctccttggttgcaacagtctacccgtcaaatgtttactaatttataagtgtgaagtttgaattatgaaagacgaaatcgtattaaaaattcacaagaataaacaactccatagattttcaaaaaaacagtcacgagaaaaaaaccacagtccgtttgtctgctcttctagtttttattatttttctattaatagttttttgttatttcgagaataaaatttgaacgatgtccgaaccacaaaagccgagccgataaatcctaagccgagcctaactttagccgtaaccatcagtcacggctcccgggctaattcatttgaaccgaatcataatcaacggtttagatcaaactcaaaacaatctaacggcaacatagacgcgtcggtgagctaaaaagagtgtgaaagccaggtcaccatagcattgtctctcccagattttttatttgggaaataatagaagaaatagaaaaaaataaaagagtgagaaaaatcgtagagctatatattcgcacatgtactcgtttcgctttccttagtgttagctgctgccgctgttgtttctcctccatttctctatctttctctctcgctgcttctcgaatcttctgtatcatcttcttcttcttcaaggtgagtctctagatccgttcgcttgattttgctgctcgttagtcgttattgttgattctctatgccgatttcgctagatctgtttagcatgcgttgtggttttatgagaaaatctttgttttgggggttgcttgttatgtgattcgatccgtgcttgttggatcgatctgagctaattcttaaggtttatgtgttagatctatggagtttgaggattcttctcgcttctgtcgatctctcgctgttatttttgtttttttcagtgaagtgaagttgtttagttcgaaatgacttcgtgtatgctcgattgatctggttttaatcttcgatctgttaggtgttgatgtttacaagtgaattctagtgttttctcgttgagatctgtgaagtttgaacctagttttctcaataatcaacatatgaagcgatgtttgagtttcaataaacgctgctaatcttcgaaactaagttgtgatctgattcgtgtttacttcatgagcttatccaattcatttcggtttcattttactttttttttagtgaaccatggcgcaagttagcagaatctgcaatggtgtgcagaacccatctcttatctccaatctctcgaaatccagtcaacgcaaatctcccttatcggtttctctgaagacgcagcagcatccacgagcttatccgatttcgtcgtcgtggggattgaagaagagtgggatgacgttaattggctctgagcttcgtcctcttaaggtcatgtcttctgtttccacggcgtgcatgggggaagcggtgatcgccgaagtatcgactcaactatcagaggtagttggcgtcatcgagcgccatctcgaaccgacgttgctggccgtacatttgtacggctccgcagtggatggcggcctgaagccacacagtgatattgatttgctggttacggtgaccgtaaggcttgatgaaacaacgcggcgagctttgatcaacgaccttttggaaacttcggcttcccctggagagagcgagattctccgcgctgtagaagtcaccattgttgtgcacgacgacatcattccgtggcgttatccagctaagcgcgaactgcaatttggagaatggcagcgcaatgacattcttgcaggtatcttcgagccagccacgatcgacattgatctggctatcttgctgacaaaagcaagagaacatagcgttgccttggtaggtccagcggcggaggaactctttgatccggttcctgaacaggatctatttgaggcgctaaatgaaaccttaacgctatggaactcgccgcccgactgggctggcgatgagcgaaatgtagtgcttacgttgtcccgcatttggtacagcgcagtaaccggcaaaatcgcgccgaaggatgtcgctgccgactgggcaatggagcgcctgccggcccagtatcagcccgtcatacttgaagctagacaggcttatcttggacaagaagaagatcgcttggcctcgcgcgcagatcagttggaagaatttgtccactacgtgaaaggcgagatcaccaaggtagtcggcaaataaggatcaattcccgatcgttcaaacatttggcaataaagtttcttaagattgaatcctgttgccggtcttgcgatgattatcatataatttctgttgaattacgttaagcatgtaataattaacatgtaatgcatgacgttatttatgagatgggtttttatgattagagtcccgcaattatacatttaatacgcgatagaaaacaaaatatagcgcgcaaactaggataaattatcgcgcgcggtgtcatctatgttactagatcggtacctacgcgtagctagcccgtgaagtttctcatctaagcccccatttggacgtgaatgtagacacgtcgaaataaagatttccgaattagaataatttgtttattgctttcgcctataaatacgacggatcgtaatttgtcgttttatcaaaatgtactttcattttataataacgctgcggacatctacatttttgaattgaaaaaaaattggtaattactctttctttttctccatattgaccatcatactcattgctgatccatgtagatttcccggacatgaagccatttacaattgaatatatcctgccgccgctgccgctttgcacccggtggagcttgcatgttggtttctacgcagaactgagccggttaggcagataatttccattgagaactgagccatgtgcaccttccccccaacacggtgagcgacggggcaacggagtgatccacatgggacttttcctagcttggctgccatttttggggtgaggccgttcgcggccgaggggcgcagcccctggggggatgggaggcccgcgttagcgggccgggagggttcgagaagggggggcaccccccttcggcgtgcgcggtcacgcgcacagggcgcagccctggttaaaaacaaggtttataaatattggtttaaaagcaggttaaaagacaggttagcggtggccgaaaaacgggcggaaacccttgcaaatgctggattttctgcctgtggacagcccctcaaatgtcaataggtgcgcccctcatctgtcagcactctgcccctcaagtgtcaaggatcgcgcccctcatctgtcagtagtcgcgcccctcaagtgtcaataccgcagggcacttatccccaggcttgtccacatcatctgtgggaaactcgcgtaaaatcaggcgttttcgccgatttgcgaggctggccagctccacgtcgccggccgaaatcgagcctgcccctcatctgtcaacgccgcgccgggtgagtcggcccctcaagtgtcaacgtccgcccctcatctgtcagtgagggccaagttttccgcgaggtatccacaacgccggcggccggccgcggtgtctcgcacacggcttcgacggcgtttctggcgcgtttgcagggccatagacggccgccagcccagcggcgagggcaaccagcccggtgagcgtcggaaagggtcgatcgaccgatgcccttgagagccttcaacccagtcagctccttccggtgggcgcggggcatgactatcgtcgccgcacttatgactgtcttctttatcatgcaactcgtaggacaggtgccggcagcgctctgggtcattttcggcgaggaccgctttcgctggagcgcgacgatgatcggcctgtcgcttgcggtattcggaatcttgcacgccctcgctcaagccttcgtcactggtcccgccaccaaacgtttcggcgagaagcaggccattatcgccggcatggcggccgacgcgctgggctacgtcttgctggcgttcgcgacgcgaggctggatggccttccccattatgattcttctcgcttccggcggcatcgggatgcccgcgttgcaggccatgctgtccaggcaggtagatgacgaccatcagggacagcttcaaggatcgctcgcggctcttaccagcctaacttcgatcattggaccgctgatcgtcacggcgatttatgccgcctcggcgagcacatggaacgggttggcatggattgtaggcgccgccctataccttgtctgcctccccgcgttgcgtcgcggtgcatggagccgggccacctcgacctgaatggaagccggcggcacctcgctaacggattcaccactccaagaattggagccaatcaattcttgcggagaactgtgaatgcgcaaaccaacccttggcagaacatatccatcgcgtccgccatctccagcagccgcacgcggcgcatctcgggcagcgttgggtcctggccacgggtgcgcatgatcgtgctcctgtcgttgaggacccggctaggctggcggggttgccttactggttagcagaatgaatcaccgatacgcgagcgaacgtgaagcgactgctgctgcaaaacgtctgcgacctgagcaacaacatgaatggtcttcggtttccgtgtttcgtaaagtctggaaacgcggaagtcagcgccctgcaccattatgttccggatctgcatcgcaggatgctgctggctaccctgtggaacacctacatctgtattaacgaagcgctggcattgaccctgagtgatttttctctggtcccgccgcatccataccgccagttgtttaccctcacaacgttccagtaaccgggcatgttcatcatcagtaacccgtatcgtgagcatcctctctcgtttcatcggtatcattacccccatgaacagaaatcccccttacacggaggcatcagtgaccaaacaggaaaaaaccgcccttaacatggcccgctttatcagaagccagacattaacgcttctggagaaactcaacgagctggacgcggatgaacaggcagacatctgtgaatcgcttcacgaccacgctgatgagctttaccgcagctgcctcgcgcgtttcggtgatgacggtgaaaacctctgacacatgcagctcccggagacggtcacagcttgtctgtaagcggatgccgggagcagacaagcccgtcagggcgcgtcagcgggtgttggcgggtgtcggggcgcagccatgacccagtcacgtagcgatagcggagtgtatactggcttaactatgcggcatcagagcagattgtactgagagtgcaccatatgcggtgtgaaataccgcacagatgcgtaaggagaaaataccgcatcaggcgctcttccgcttcctcgctcactgactcgctgcgctcggtcgttcggctgcggcgagcggtatcagctcactcaaaggcggtaatacggttatccacagaatcaggggataacgcaggaaagaacatgtgagcaaaaggccagcaaaaggccaggaaccgtaaaaaggccgcgttgctggcgtttttccataggctccgcccccctgacgagcatcacaaaaatcgacgctcaagtcagaggtggcgaaacccgacaggactataaagataccaggcgtttccccctggaagctccctcgtgcgctctcctgttccgaccctgccgcttaccggatacctgtccgcctttctcccttcgggaagcgtggcgctttctcatagctcacgctgtaggtatctcagttcggtgtaggtcgttcgctccaagctgggctgtgtgcacgaaccccccgttcagcccgaccgctgcgccttatccggtaactatcgtcttgagtccaacccggtaagacacgacttatcgccactggcagcagccactggtaacaggattagcagagcgaggtatgtaggcggtgctacagagttcttgaagtggtggcctaactacggctacactagaaggacagtatttggtatctgcgctctgctgaagccagttaccttcggaaaaagagttggtagctcttgatccggcaaacaaaccaccgctggtagcggtggtttttttgtttgcaagcagcagattacgcgcagaaaaaaaggatctcaagaagatcctttgatcttttctacggggtctgacgctcagtggaacgaaaactcacgttaagggattttggtcatgagattatcaaaaaggatcttcacctagatccttttaaattaaaaatgaagttttaaatcaatctaaagtatatatgagtaaacttggtctgacagttaccaatgcttaatcagtgaggcacctatctcagcgatctgtctatttcgttcatccatagttgcctgactccccgtcgtgtagataactacgatacgggagggcttaccatctggccccagtgctgcaatgataccgcgagacccacgctcaccggctccagatttatcagcaataaaccagccagccggaagggccgagcgcagaagtggtcctgcaactttatccgcctccatccagtctattaattgttgccgggaagctagagtaagtagttcgccagttaatagtttgcgcaacgttgttgccattgctgcaggtcgggagcacaggatgacgcctaacaattcattcaagccgacaccgcttcgcggcgcggcttaattcaggagttaaacatcatgagggaagcggtgatcgccgaagtatcgactcaactatcagaggtagttggcgtcatcgagcgccatctcgaaccgacgttgctggccgtacatttgtacggctccgcagtggatggcggcctgaagccacacagtgatattgatttgctggttacggtgaccgtaaggcttgatgaaacaacgcggcgagctttgatcaacgaccttttggaaacttcggcttcccctggagagagcgagattctccgcgctgtagaagtcaccattgttgtgcacgacgacatcattccgtggcgttatccagctaagcgcgaactgcaatttggagaatggcagcgcaatgacattcttgcaggtatcttcgagccagccacgatcgacattgatctggctatcttgctgacaaaagcaagagaacatagcgttgccttggtaggtccagcggcggaggaactctttgatccggttcctgaacaggatctatttgaggcgctaaatgaaaccttaacgctatggaactcgccgcccgactgggctggcgatgagcgaaatgtagtgcttacgttgtcccgcatttggtacagcgcagtaaccggcaaaatcgcgccgaaggatgtcgctgccgactgggcaatggagcgcctgccggcccagtatcagcccgtcatacttgaagctaggcaggcttatcttggacaagaagatcgcttggcctcgcgcgcagatcagttggaagaatttgttcactacgtgaaaggcgagatcaccaaggtagtcggcaaataatgtctaacaattcgttcaagccgacgccgcttcgcggcgcggcttaactcaagcgttagatgctgcaggcatcgtggtgtcacgctcgtcgtttggtatggcttcattcagctccggttcccaacgatcaaggcgagttacatgatcccccatgttgtgcaaaaaagcggttagctccttcggtcctccgatcgaggatttttcggcgctgcgctacgtccgcgaccgcgttgagggatcaagccacagcagcccactcgaccttctagccgacccagacgagccaagggatctttttggaatgctgctccgtcgtcaggctttccgacgtttgggtggttgaacagaagtcattatcgcacggaatgccaagcactcccgaggggaaccctgtggttggcatgcacatacaaatggacgaacggataaaccttttcacgcccttttaaatatccgattattctaataaacgctcttttctcttaggtttacccgccaatatatcctgtcaaacactgatagtttaaactgaaggcgggaaacgacaatctaaaagattgacacattgcctatactacattctagcgtaggttaaatttatatcagataatgtgggagaaagagatcagttaccattgcatgacaatagctgaccccagatatgagttgttgaaagaagaaacgagcctgtggcatgacaatgggttaatagttacacaggaaatagagagctagcacaagcaaaagtaaacaaattgtataagaacctcatcctcattaaaacgccctgcattgcagattttctcaaatagttctccaccagatgcatattccattacaatgtctagatgagtcggtgttagaataacctgagtcaaatatcaaagaacattttccatgaatatgattattgtacctctgaacataaaaatatataaatacaaatatataccaacctccttaaacctgataatgttaggatgtcttagagacctgtgattaatgatttctcttttaacattttcatcaatctgtgacacacagcaaatgatagggggcgcgccactgttaataatttttaaacgtcagcgcactaaaaaaacgaaaagacggacacgtgaaaataaaaaacacacactagtttatgacgcaatactattttacttatgatttgggtacattagacaaaaccgtgaaagagatgtatcagctatgaaacctgtatacttcaatacagagacttactcatatcggatacgtacgcacgaagtatcatattaattattttaatttttaataaatattttatcggatacttatgtgatactctacatatacacaaggatatttctaagatactttatagatacgtatcctagaaaaacatgaagagtaaaaaagtgagacaatgttgtaaaaattcattataaatgtatatgattcaattttagatatgcatcagtataattgattctcgatgaaacacttaaaattatatttcttgtggaagaacgtagcgagagaggtgattcagttagacaacattaaataaaattaatgttaagttcttttaatgatgtttctctcaatatcacatcatatgaaaatgtaatatgatttataagaaaatttttaaaaaatttattttaataatcacatgtactattttttaaaaattgtatcttttataataatacaataataaagagtaatcagtgttaatttttcttcaaatataagttttattataaatcattgttaacgtatcataagtcattaccgtatcgtatcttaatttttttttaaaaaccgctaattcacgtacccgtattgtattgtacccgcacctgtatcacaatcgatcttagttagaagaattgtctcgaggcggtgcaagacagcatataatagacgtggactctcttataccaaacgttgtcgtatcacaaagggttaggtaacaagtcacagtttgtccacgtgtcacgttttaattggaagaggtgccgttggcgtaatataacagccaatcgatttttgctataaaagcaaatcaggtaaactaaacttcttcattcttttcttccccatcgctacaaaaccggttcctttggaaaagagattcattcaaacctagcacccaattccgtttcaaggtataatctactttctattcttcgattattttattattattagctactatcgtttaatcgatcttttcttttgatccgtcaaatttaaattcaattagggttttgttcttttctttcatctgattgaaatccttctgaattgaaccgtttacttgattttactgtttattgtatgatttaatcctttgtttttcaaagacagtctttagattgtgattaggggttcatataaatttttagatttggatttttgtattgtatgattcaaaaaatacgtcctttaattagattagtacatggatattttttacccgatttattgattgtcagggagaatttgatgagcaagtttttttgatgtctgttgtaaattgaattgattataattgctgatctgctgcttccagttttcataacccatattcttttaaccttgttgtacacacaatgaaaaattggtgattgattcatttgtttttctttgttttggattatacagggtatggcgccgccgcctgccctccctccaaagaggcgaagaagtggtggatcttccggggggtccccccctcctgctttacctccaaaaagacgtcgttctggtggttcaagtggaggttctccacctcctgcacttcctcccaagagaagaaggagcggcggcagctcaggaggatcaccaccaccagctttgccacccaaaaggcgccggggctcctccgagacaccaggcacctccgagagcgcgacgcccgagggcggctccggcggctccggcagctccaagctggagaagtttacaaactgttacagcctctccaaaaccctcaggtttaaagcgatcccggtgggcaagacccaggagaacatcgacaacaagaggctcctggtggaagacgagaagcgcgccgaagactacaagggcgtgaagaagctgctcgataggtactacctcagctttattaacgacgtgctgcacagcatcaaactcaagaatctcaacaactacatctccctcttccgcaaaaagacccgcaccgagaaggagaacaaggagctggagaacctggagatcaacctccgcaaggaaatcgccaaagcgttcaagggcaatgaagggtacaagagcctcttcaagaaagacatcatcgaaactatcctcccagagtttctcgatgacaaggacgagatcgcgctggtgaactcctttaacgggttcacaaccgcgtttaccggcttctttgataacagggaaaatatgttctccgaggaggccaagtccaccagcatcgccttcaggtgtatcaacgagaacctcacccgctacatttccaatatggacattttcgagaaggtggatgcgatcttcgataagcacgaggtgcaggagatcaaagagaagattctcaattccgattatgacgtcgaggatttcttcgaaggggagttctttaattttgtgctcacacaagagggcattgacgtgtacaacgcgattatcgggggcttcgtcacagagtccggggagaagattaaggggctgaatgagtacatcaatctgtacaatcagaagaccaagcagaaactgccgaaattcaagccgctctacaagcaagtcctgtccgatagggaaagcctctccttctacggcgagggctataccagcgacgaggaggtgctggaagtcttccgcaacacactgaataagaatagcgagattttctcctccatcaagaagctcgagaagctctttaagaactttgacgagtacagctccgccgggattttcgtgaagaacgggccggcgatcagcaccatctccaaggacatctttggcgagtggaacgtcatcagggacaagtggaacgccgagtacgacgacatccacctgaagaagaaggcggtggtgaccgagaagtatgaggacgatcgcaggaagtccttcaaaaaaatcggctccttcagcctcgaacagctccaggagtatgccgatgcggatctgtccgtcgtcgagaagctgaaggaaatcatcattcagaaggtcgacgagatctataaagtgtacgggtccagcgagaagctgttcgacgccgactttgtgctcgagaagtccctcaaaaagaatgacgccgtggtggccattatgaaagacctgctcgactccgtgaagtccttcgaaaattacattaaagcgttctttggggaggggaaggaaactaacagggatgagtccttctatggcgactttgtcctcgcgtacgacatcctgctgaaggtcgaccacatttacgacgcgatccgcaactacgtgacacagaagccgtactccaaagacaagttcaagctgtacttccagaacccgcaatttatggggggctgggacaaggataaagagacagactaccgcgcgacaattctccgctatggctccaaatactatctggccatcatggacaagaagtacgcgaagtgcctgcagaagatcgacaaagacgacgtcaatggcaactatgaaaagatcaactacaagctgctgccgggtccgaacaagatgctcccgaaggtgttcttcagcaagaagtggatggcctactacaatccaagcgaggatattcagaaaatctataaaaacgggaccttcaagaagggggacatgtttaacctcaacgactgccacaagctcattgatttcttcaaggatagcatttcccgctacccgaaatggtccaatgcgtacgattttaacttctccgagacagaaaagtacaaagacatcgcgggcttttacagggaggtggaggagcaagggtataaagtttcttttgaatccgcgagcaagaaggaagtcgacaagctcgtcgaggagggcaagctctacatgttccaaatttataacaaggacttttccgacaagagccatgggaccccaaacctccacaccatgtacttcaaactgctctttgacgagaacaaccacgggcaaatcaggctgagcggcggcgccgaattattcatgcgcagggcctccctcaagaaggaagagctggtcgtccatccagccaattccccgatcgcgaacaagaacccggacaatccgaaaaagaccaccaccctgtcctacgacgtctacaaggacaaacgcttcagcgaagaccagtacgaattacacatcccaattgcgattaataagtgcccaaagaatatcttcaaaattaatacagaggtcagggtgctgctcaaacacgacgacaatccgtatgtcatcggcattgacaggggcgagcgcaatctgctctatatcgtggtcgtggatgggaagggcaatattgtggagcagtactccctgaacgagattatcaacaacttcaatgggattaggattaagaccgactatcacagcctgctcgacaagaaagaaaaagagaggtttgaggcccgccaaaactggacctccattgagaatatcaaagaattaaaggccggctatatttcccaagtcgtccacaagatctgcgagctggtggagaaatatgacgccgtgattgcgctcgaagacttaaattctgggttcaagaactcccgcgtgaaggtggaaaaacaggtgtatcagaaattcgagaaaatgctgatcgacaaactcaattatatggtggataagaagtccaacccgtgtgccacagggggcgcgctgaagggctatcagatcaccaacaagttcgagagcttcaagagcatgagcacccagaacgggtttattttctacatcccggcgtggctcacctccaagattgacccgagcaccggcttcgtgaacctcctgaagacaaagtatacctccattgccgacagcaagaagtttatctcctccttcgaccgcattatgtatgtgccggaggaggacctcttcgagttcgccctcgactacaaaaacttcagccgcacagatgcggattacatcaagaagtggaagctgtactcctacgggaacaggatccgcatcttcaggaatccaaaaaaaaataacgtctttgactgggaggaagtgtgcctgacatccgcctacaaggaactgttcaataaatacggcatcaattaccagcagggcgacattcgcgccctcctctgtgagcagtccgacaaagcgttttactccagcttcatggccctcatgtccctgatgctccaaatgaggaatagcatcacagggcgcaccgacgtcgacttcctcatcagcccggtgaagaactccgacgggatcttttacgactcccgcaactatgaggcgcaagagaatgcgatcctcccgaagaacgccgatgcgaacggggcctataatatcgccaggaaagtgctctgggccatcgggcagttcaaaaaggcggaggatgagaagctcgacaaggtgaaaattgccatttccaacaaggagtggctggagtacgcgcagacctccgtgaagcactgaaagggctctctgtcatgatttcatactttcattattgagctctgtaattacaattatgaccatgagaacatctcttattgtgtggccttttaattgctgatgttagtactgaaccaaagcttatcgtgatgatgtaaaagcaataagtacttgtttgtagcttctttgtgtctccctttgggcttaatacatctgtttagtgttgtggctttggcatagacttctcttggtaataatgccttgcaatgcaaaatttcaattatcaaattctattatgttctcaccttatggtaacagcttaccctgtggaagatgagattcttgagttgagtcattgccaatttttggcattagcttttgaattagtgaattttgacaaaaattaccgtgacactgattttgttgaagctcttaagtgtagtttttacaaaatttcagtggctcgttgtgattatgtcaaactcacggcgaatgtagttcttacagaatttcagtggctccctgcaggctcgaggtcattcatatgcttgagaagagagtcgggatagtccaaaataaaacaaaggtaagattacctggtcaaaagtgaaaacatcagttaaaaggtggtataaagtaaaatatcggtaataaaaggtggcccaaagtgaaatttactcttttctactattataaaaattgaggatgtttttgtcggtactttgatacgtcatttttgtatgaattggtttttaagtttattcgcttttggaaatgcatatctgtatttgagtcgggttttaagttcgtttgcttttgtaaatacagagggatttgtataagaaatatctttagaaaaacccatatgctaatttgacataatttttgagaaaaatatatattcaggcgaattctcacaatgaacaataataagattaaaatagctttcccccgttgcagcgcatgggtattttttctagtaaaaataaaagataaacttagactcaaaacatttacaaaaacaacccctaaagttcctaaagcccaaagtgctatccacgatccatagcaagcccagcccaacccaacccaacccaacccaccccagtccagccaactggacaatagtctccacacccccccactatcaccgtgagttgtccgcacgcaccgcacgtctcgcagccaaaaaaaaaaagaaagaaaaaaaagaaaaagaaaaaacagcaggtgggtccgggtcgtgggggccggaaacgcgaggaggatcgcgagccagcgacgaggagcttaggcctcatcgttgaagatgcctctgccgacagtggtcccaaagatggacccccacccacgaggagcatcgtggaaaaagaagacgttccaaccacgtcttcaaagcaagtggattgatgtgatatctccactgacgtaagggatgacgcacaatcccactatccttcgaggcctcatcgttgaagatgcctctgccgacagtggtcccaaagatggacccccacccacgaggagcatcgtggaaaaagaagacgttccaaccacgtcttcaaagcaagtggattgatgtgatatctccactgacgtaagggatgacgcacaatcccactatccttcgaagctccctccctccgcttccaaagaaacgccccccatcgccactatatacatacccccccctctcctcccatccccccaacccttctagaaccatcttccacacactcaagccacactattggagaacacacagggacaacacaccataagatccaagggaggcctccgccgccgccggtaaccaccccgcccctctcctctttctttctccgtttttttttccgtctcggtctcgatctttggccttggtagtttgggtgggcgagaggcggcttcgtgcgcgcccagatcggtgcgcgggaggggcgggatctcgcggctggggctctcgccggcgtggatccggcccggatctcgcggggaatggggctctcggatgtagatctgcgatccgccgttgttgggggagatgatggggggtttaaaatttccgccgtgctaaacaagatcaggaagaggggaaaagggcactatggtttatatttttatatatttctgctgcttcgtcaggcttagatgtgctagatctttctttcttctttttgtgggtagaatttgaatccctcagcattgttcatcggtagtttttcttttcatgatttgtgacaaatgcagcctcgtgcggagcttttttgtaggtagaaggcggccgcatggcccagtctaagcacgggttgacgaaggagatgactatgaagtatcgcatggaaggctgcgttgacggccacaaattcgtcattaccggcgagggcatcggctacccctttaaggtaagtttctgcttctacctttgatatatatataataattatcattaattagtagtaatataatatttcaaatatttttttcaaaataaaagaatgtagtatatagcaattgcttttctgtagtttataagtgtgtatattttaatttataacttttctaatatatgaccaaaatttgttgatgtgcagggcaagcaagcgataaacctgtgcgtggtggagggtggccctctgcccttcgccgaggatatactctcagccgccttcatgtacgggaatcgggtgttcacggagtacccgcaagacatcgtggactacttcaagaactcctgccccgccggatacacatgggaccgttccttcctcttcgaggacggagccgtttgcatctgcaacgcggacatcaccgtgtccgtcgaggagaactgcatgtaccacgagtcaaagttctatggagtgaacttcccggccgatggtcccgtgatgaagaaaatgacggacaactgggagccgtcgtgcgagaaaatcattcccgtcccaaaacagggaatcctcaagggcgacgtgtcgatgtacctacttctcaaggacggtggacggctacggtgccagttcgacactgtttacaaggcgaagtcggtgccgaggaagatgccggactggcactttatccagcacaagctgacaagggaggacagaagcgacgctaagaaccagaaatggcacctcaccgagcacgccatcgccagtggctctgcgctgcccgggtgaccctgcaatgtgaccctagacttgtccatcttctggattggccaacttaattaatgtatgaaataaaaggatgcacacatagtgacatgctaatcactataatgtgggcatcaaagttgtgtgttatgtgtaattactaattatctgaataagagaaagagatcatccatatttcttatcctaaatgaatgtcacgtgtctttataattctttgatgaaccagatgcattttattaaccaattccatatacatataaatattaatcatatataattaatatcaattgggttagcaaaacaaatctagtctaggtgtgttttgctaattattgggggatagtgcaaaaagaaatctacgttctcaataattcagatagaaaacttaataaagtgagataatttacatagattgcttttatcctttgatatatgtgaaaccatgcatgatataaggaaaatagatagagaaataattttttacatcgttgaatatgtaaacaatttaattcaagaagctaggaatataaatattgaggagtttatgattattattattattttgatgttcaatgaagttttttttaatttcatatgaagtatacaaaaattcttcatagatttttgtttctatgccgtagttatctttaatatatttgtggttgaagaaatttattgctagaaacgaatggattgtcaatttttttttaaagcaaatatatatgaaattatactgtatattattttagtcatgattaaaatgtggccttaattgaatcatctttctcattcattttttcaaaagcatatcaggatgattgatatttatctattttaaaaattaatttaagggttcaaattaaatttaacttaaaagtgtcctaaccgtagttaaaggtttactttaaaaaaatactatgaaaaatctaatcttctatgaatcgagggcccttagctagttagacgataaaaatgttttaaacgatatatattataaaaaaaaacgtttcaaaaataaatacaaaaatgtttttaaatatatataatttaactcattaaagaaaataaaaatgcaagtgcggtgacaagacaagctaaaagttgcaaaagaaatggcagggctataaggctcacctactcctggatttaccaaattttggttcgtccctatactcgaaaaataaaacaaaataaatttcagtatcttcgtttttgtatgctttgactgtgaggcgaggccaactttcttcttctgtctgagatgaattttgtttgcctcctgtgaaggatgtatcattcaaagtgaatgttttgcaactgccagtagtcccacatcgaccaaatattcttattacagtgtgtttatatagcacctggagaaggaatgggttgtttcaaagattaaataatttctactaagtgtagatacacctactcatctggccattgttaatttctactaagtgtagatttttttta

SEQ ID NO: 96 - DNA, 19080 bp, synthetic construct
  misc_feature 1..19080: note = pWISE3771 Full plasmid sequence
  source 1..19080: mol_type = other DNA
aagcttcgataaaaatgttttaaacgatatatattataaaaaaaaacgtttcaaaaataaatacaaaaatgtttttaaatatatataatttaactcattaaagaaaataaaaatgcaagtgcggtgacaagacaagctaaaagttgcaaaagaaatggcagggctataaggctcacctactcctggatttaccaaattttggttcgtccctatactcgaaaaataaaacaaaataaatttcagtatcttcgtttttgtatgctttgactgtgaggcgaggccaactttcttcttctgtctgagatgaattttgtttgcctcctgtgaaggatgtatcattcaaagtgaatgttttgcaactgccagtagtcccacatcgaccaaatattcttattacagtgtgtttatatagcacctggagaaggaatgggttgtttcaaagattaaataatttctactaagtgtagattgtgtgatgttcgatgttggatttaatttctactaagtgtagattttttttactagtgatatccgtcgactggtacctacgcgtagctagcccgtgaagtttctcatctaagcccccatttggacgtgaatgtagacacgtcgaaataaagatttccgaattagaataatttgtttattgctttcgcctataaatacgacggatcgtaatttgtcgttttatcaaaatgtactttcattttataataacgctgcggacatctacatttttgaattgaaaaaaaattggtaattactctttctttttctccatattgaccatcatactcattgctgatccatgtagatttcccggacatgaagccatttacaattgaatatatcctgccgccgctgccgctttgcacccggtggagcttgcatgttggtttctacgcagaactgagccggttaggcagataatttccattgagaactgagccatgtgcaccttccccccaacacggtgagcgacggggcaacggagtgatccacatgggacttttcctagcttggctgccatttttggggtgaggccgttcgcggccgaggggcgcagcccctggggggatgggaggcccgcgttagcgggccgggagggttcgagaagggggggcaccccccttcggcgtgcgcggtcacgcgcacagggcgcagccctggttaaaaacaaggtttataaatattggtttaaaagcaggttaaaagacaggttagcggtggccgaaaaacgggcggaaacccttgcaaatgctggattttctgcctgtggacagcccctcaaatgtcaataggtgcgcccctcatctgtcagcactctgcccctcaagtgtcaaggatcgcgcccctcatctgtcagtagtcgcgcccctcaagtgtcaataccgcagggcacttatccccaggcttgtccacatcatctgtgggaaactcgcgtaaaatcaggcgttttcgccgatttgcgaggctggccagctccacgtcgccggccgaaatcgagcctgcccctcatctgtcaacgccgcgccgggtgagtcggcccctcaagtgtcaacgtccgcccctcatctgtcagtgagggccaagttttccgcgaggtatccacaacgccggcggccggccgcggtgtctcgcacacggcttcgacggcgtttctggcgcgtttgcagggccatagacggccgccagcccagcggcgagggcaaccagcccggtgagcgtcggaaagggtcgatcgaccgatgcccttgagagccttcaacccagtcagctccttccggtgggcgcggggcatgactatcgtcgccgcacttatgactgtcttctttatcatgcaactcgtaggacaggtgccggcagcgctctgggtcattttcggcgaggaccgctttcgctggagcgcgacgatgatcggcctgtcgcttgcggtattcggaatcttgcacgccctcgctcaagccttcgtcactggtcccgccaccaaacgtttcggcgagaagcaggccattatcgccggcatggcggccgacgcgctgggctacgtcttgctggcgttcgcgacgcgaggctggatggccttccccattatgattcttctcgcttccggcggcatcgggatgcccgcgttgcaggccatgctgtccaggcaggtagatgacgaccatcagggacagcttcaaggatcgctcgcggctcttaccagcctaacttcgatcattggaccgctgatcgtcacggcgatttatgccgcctcggcgagcacatggaacgggttggcatggattgtaggcgccgccctataccttgtctgcctccccgcgttgcgtcgcggtgcatggagccgggccacctcgacctgaatggaagccggcggcacctcgctaacggattcaccactccaagaattggagccaatcaattcttgcggagaactgtgaatgcgcaaaccaacccttggcagaacatatccatcgcgtccgccatctccagcagccgcacgcggcgcatctcgggcagcgttgggtcctggccacgggtgcgcatgatcgtgctcctgtcgttgaggacccggctaggctggcggggttgccttactggttagcagaatgaatcaccgatacgcgagcgaacgtgaagcgactgctgctgcaaaacgtctgcgacctgagcaacaacatgaatggtcttcggtttccgtgtttcgtaaagtctggaaacgcggaagtcagcgccctgcaccattatgttccggatctgcatcgcaggatgctgctggctaccctgtggaacacctacatctgtattaacgaagcgctggcattgaccctgagtgatttttctctggtcccgccgcatccataccgccagttgtttaccctcacaacgttccagtaaccgggcatgttcatcatcagtaacccgtatcgtgagcatcctctctcgtttcatcggtatcattacccccatgaacagaaatcccccttacacggaggcatcagtgaccaaacaggaaaaaaccgcccttaacatggcccgctttatcagaagccagacattaacgcttctggagaaactcaacgagctggacgcggatgaacaggcagacatctgtgaatcgcttcacgaccacgctgatgagctttaccgcagctgcctcgcgcgtttcggtgatgacggtgaaaacctctgacacatgcagctcccggagacggtcacagcttgtctgtaagcggatgccgggagcagacaagcccgtcagggcgcgtcagcgggtgttggcgggtgtcggggcgcagccatgacccagtcacgtagcgatagcggagtgtatactggcttaactatgcggcatcagagcagattgtactgagagtgcaccatatgcggtgtgaaataccgcacagatgcgtaaggagaaaataccgcatcaggcgctcttccgcttcctcgctcactgactcgctgcgctcggtcgttcggctgcggcgagcggtatcagctcactcaaaggcggtaatacggttatccacagaatcaggggataacgcaggaaagaacatgtgagcaaaaggccagcaaaaggccaggaaccgtaaaaaggccgcgttgctggcgtttttccataggctccgcccccctgacgagcatcacaaaaatcgacgctcaagtcagaggtggcgaaacccgacaggactataaagataccaggcgtttccccctggaagctccctcgtgcgctctcctgttccgaccctgccgcttaccggatacctgtccgcctttctcccttcgggaagcgtggcgctttctcatagctcacgctgtaggtatctcagttcggtgtaggtcgttcgctccaagctgggctgtgtgcacgaaccccccgttcagcccgaccgctgcgccttatccggtaactatcgtcttgagtccaacccggtaagacacgacttatcgccactggcagcagccactggtaacaggattagcagagcgaggtatgtaggcggtgctacagagttcttgaagtggtggcctaactacggctacactagaaggacagtatttggtatctgcgctctgctgaagccagttaccttcggaaaaagagttggtagctcttgatccggcaaacaaaccaccgctggtagcggtggtttttttgtttgcaagcagcagattacgcgcagaaaaaaaggatctcaagaagatcctttgatcttttctacggggtctgacgctcagtggaacgaaaactcacgttaagggattttggtcatgagattatcaaaaaggatcttcacctagatccttttaaattaaaaatgaagttttaaatcaatctaaagtatatatgagtaaacttggtctgacagttaccaatgcttaatcagtgaggcacctatctcagcgatctgtctatttcgttcatccatagttgcctgactccccgtcgtgtagataactacgatacgggagggcttaccatctggccccagtgctgcaatgataccgcgagacccacgctcaccggctccagatttatcagcaataaaccagccagccggaagggccgagcgcagaagtggtcctgcaactttatccgcctccatccagtctattaattgttgccgggaagctagagtaagtagttcgccagttaatagtttgcgcaacgttgttgccattgctgcaggtcgggagcacaggatgacgcctaacaattcattcaagccgacaccgcttcgcggcgcggcttaattcaggagttaaacatcatgagtattcaacatttccgtgtcgcccttattcccttttttgcggcattttgccttcctgtttttgctcacccagaaacgctggtgaaagtaaaagatgctgaagatcagttgggtgcacgagtgggttacatcgaactggatctcaacagcggtaagatccttgagagttttcgccccgaagaacgttttccaatgatgagcacttttaaagttctgctatgtggcgcggtattatcccgtattgacgccgggcaagagcaactcggtcgccgcatacactattctcagaatgacttggttgagtactcaccagtcacagaaaagcatcttacggatggcatgacagtaagagaattatgcagtgctgccataaccatgagtgataacactgcggccaacttacttctgacaacgatcggaggaccgaaggagctaaccgcttttttgcacaacatgggggatcatgtaactcgccttgatcgttgggaaccggagctgaatgaagccataccaaacgacgagcgtgacaccacgatgcctgtagcaatggcaacaacgttgcgcaaactattaactggcgaactacttactctagcttcccggcaacaattaatagactggatggaggcggataaagttgcaggaccacttctgcgctcggcccttccggctggctggtttattgctgataaatctggagccggtgagcgtggttctcgcggtatcattgcagcactggggccagatggtaagccctcccgtatcgtagttatctacacgacggggagtcaggcaactatggatgaacgaaatagacagatcgctgagataggtgcctcactgattaagcattggtaatgtctaacaattcgttcaagccgacgccgcttcgcggcgcggcttaactcaagcgttagatgctgcaggcatcgtggtgtcacgctcgtcgtttggtatggcttcattcagctccggttcccaacgatcaaggcgagttacatgatcccccatgttgtgcaaaaaagcggttagctccttcggtcctccgatcgaggatttttcggcgctgcgctacgtccgcgaccgcgttgagggatcaagccacagcagcccactcgaccttctagccgacccagacgagccaagggatctttttggaatgctgctccgtcgtcaggctttccgacgtttgggtggttgaacagaagtcattatcgcacggaatgccaagcactcccgaggggaaccctgtggttggcatgcacatacaaatggacgaacggataaaccttttcacgcccttttaaatatccgattattctaataaacgctcttttctcttaggtttacccgccaatatatcctgtcaaacactgatagtttaaactgaaggcgggaaacgacaatctcctaggttaggattttttttcacgaaattgcttcttgaaattacgtgatggattttgattctgatttatcttgtgattgttgactctacagatgcagatcttcgtcaagaccctcaccggaaagaccatcacccttgaggtggaaagctctgacaccatcgacaacgtcaaggccaagatccaggacaaggaaggaattcccccggatcagcaacgtctcatcttcgccggaaagcagctcgaggacggccgtaccctcgccgactacaacatccagaaggagtcaacccttcaccttgtccttcgtctccgtggtggcatgcagatcttcgtcaagactctcactggcaaaaccataaccctagaggtcgaaagctctgacaccattgacaacgtcaaggccaagatccaggacaaggagggaatccccccagaccagcaacgtctcatcttcgccggaaagcaacttgaggacgggcgcaccctcgccgactacaacatccagaaggaatcaacccttcacctcgtcctccgtctccgtggtggcatgcagatcttcgttaagaccctcaccggcaagactataaccctagaagtcgagagctccgacaccatcgacaacgtcaaggctaagatccaggacaaggagggtatccccccagaccagcagaggctgatcttcgccggcaagcagctcgaggacggacgtacccttgctgactacaacatccagaaggagtcaactctccacttggtgttgcgtcttcgtggtggtatgcagatcttcgtcaagacccttacgggtaagactattaccctcgaggtggagagctccgacaccattgacaatgtgaaggcgaagatccaggacaaggaaggaatcccaccggaccagcagaggcttatttttgctggcaaacagctagaggatggaaggaccctcgctgactacaacatccagaaggagtcaactctgcacttggtgttgcgtcttcgtggggggttttcaaatgctgctgatgaagtggcaactcaattactgaattttgacctcttgaagcttgccggtgatgttgagtctaaccctggaccaatggcgcaagttagcagaatctgcaatggtgtgcagaacccatctcttatctccaatctctcgaaatccagtcaacgcaaatctcccttatcggtttctctgaagacgcagcagcatccacgagcttatccgatttcgtcgtcgtggggattgaagaagagtgggatgacgttaattggctctgagcttcgtcctcttaaggtcatgtcttctgtttccacggcgtgcatgggggaagcggtgatcgccgaagtatcgactcaactatcagaggtagttggcgtcatcgagcgccatctcgaaccgacgttgctggccgtacatttgtacggctccgcagtggatggcggcctgaagccacacagtgatattgatttgctggttacggtgaccgtaaggcttgatgaaacaacgcggcgagctttgatcaacgaccttttggaaacttcggcttcccctggagagagcgagattctccgcgctgtagaagtcaccattgttgtgcacgacgacatcattccgtggcgttatccagctaagcgcgaactgcaatttggagaatggcagcgcaatgacattcttgcaggtatcttcgagccagccacgatcgacattgatctggctatcttgctgacaaaagcaagagaacatagcgttgccttggtaggtccagcggcggaggaactctttgatccggttcctgaacaggatctatttgaggcgctaaatgaaaccttaacgctatggaactcgccgcccgactgggctggcgatgagcgaaatgtagtgcttacgttgtcccgcatttggtacagcgcagtaaccggcaaaatcgcgccgaaggatgtcgctgccgactgggcaatggagcgcctgccggcccagtatcagcccgtcatacttgaagctagacaggcttatcttggacaagaagaagatcgcttggcctcgcgcgcagatcagttggaagaatttgtccactacgtgaaaggcgagatcaccaaggtagtcggcaaataagctggagctgatgtctgtgtgatgtctgatgttggattttcccagacattttaagaagaaatgtgatgtgtaatgggtctgtaatgacctttgaaaataagtttggtttgtgttgaactctattgtcccattaatgttactactgtttgttatcaatttgtggagctgatatataattatcaactgtatgctggcatattgtgtttgaattttgttctcaatccagtgaattggcgtatattagtgggttttttattcttcatgcttatcacggaggaaaagcagggatgagttgtgtgaaggatggtgatcatcccacgaattattagattttggtattataggttaaagatatttattaggtagggagaactcttggattagattctaaagtgatattttgaaaacacaccaaaggatttttgaacaaacggagatcatgatccctagtttcaattagctgccccttaccaagaggtagcaacttaaaaattatgctcgtgaagcatatttggtatcgtatataaattatgtaagcaatctgcttcagttggaacattaattggcttgcggaatgcacatttagatgatccacacaggtccacataaaaattcctaatcaattttagttatgcaatctttctgcttcaggtagtccttgtcttacagaaagcacattgagatgatccccacacagatccacataaaaaattcctaatcaataataacttgaaaatcattaaaagatgtaatgccatactaatccctaatttttgtgcaagtttttgtatactggaccccaaaaaataccaaaaagaaaaaacaagttattcagtgatatttttctgctccaatataaatttgattaccaaataccaaaaaataaaaacactattcagtggtatttttctgctccaatactggaccccaaattaatcagaatcggatccgtttaacagataaaaacaaaagcgatcgggttaaaatcccatttttacaaataacaacgcaggtttatacatgaaacaaatgtcattacctaggctggcagcacatcccccgttcgcgagctggcgtaacagcgaagaggcccgggcgcgccactgttaataatttttaaacgtcagcgcactaaaaaaacgaaaagacggacacgtgaaaataaaaaacacacactagtttatgacgcaatactattttacttatgatttgggtacattagacaaaaccgtgaaagagatgtatcagctatgaaacctgtatacttcaatacagagacttactcatatcggatacgtacgcacgaagtatcatattaattattttaatttttaataaatattttatcggatacttatgtgatactctacatatacacaaggatatttctaagatactttatagatacgtatcctagaaaaacatgaagagtaaaaaagtgagacaatgttgtaaaaattcattataaatgtatatgattcaattttagatatgcatcagtataattgattctcgatgaaacacttaaaattatatttcttgtggaagaacgtagcgagagaggtgattcagttagacaacattaaataaaattaatgttaagttcttttaatgatgtttctctcaatatcacatcatatgaaaatgtaatatgatttataagaaaatttttaaaaaatttattttaataatcacatgtactattttttaaaaattgtatcttttataataatacaataataaagagtaatcagtgttaatttttcttcaaatataagttttattataaatcattgttaacgtatcataagtcattaccgtatcgtatcttaatttttttttaaaaaccgctaattcacgtacccgtattgtattgtacccgcacctgtatcacaatcgatcttagttagaagaattgtctcgaggcggtgcaagacagcatataatagacgtggactctcttataccaaacgttgtcgtatcacaaagggttaggtaacaagtcacagtttgtccacgtgtcacgttttaattggaagaggtgccgttggcgtaatataacagccaatcgatttttgctataaaagcaaatcaggtaaactaaacttcttcattcttttcttccccatcgctacaaaaccggttcctttggaaaagagattcattcaaacctagcacccaattccgtttcaaggtataatctactttctattcttcgattattttattattattagctactatcgtttaatcgatcttttcttttgatccgtcaaatttaaattcaattagggttttgttcttttctttcatctgattgaaatccttctgaattgaaccgtttacttgattttactgtttattgtatgatttaatcctttgtttttcaaagacagtctttagattgtgattaggggttcatataaatttttagatttggatttttgtattgtatgattcaaaaaatacgtcctttaattagattagtacatggatattttttacccgatttattgattgtcagggagaatttgatgagcaagtttttttgatgtctgttgtaaattgaattgattataattgctgatctgctgcttccagttttcataacccatattcttttaaccttgttgtacacacaatgaaaaattggtgattgattcatttgtttttctttgttttggattatacagggtatggcgtccaagctggagaagtttacaaactgttacagcctctccaaaaccctcaggtttaaagcgatcccggtgggcaagacccaggagaacatcgacaacaagaggctcctggtggaagacgagaagcgcgccgaagactacaagggcgtgaagaagctgctcgataggtactacctcagctttattaacgacgtgctgcacagcatcaaactcaagaatctcaacaactacatctccctcttccgcaaaaagacccgcaccgagaaggagaacaaggagctggagaacctggagatcaacctccgcaaggaaatcgccaaagcgttcaagggcaatgaagggtacaagagcctcttcaagaaagacatcatcgaaactatcctcccagagtttctcgatgacaaggacgagatcgcgctggtgaactcctttaacgggttcacaaccgcgtttaccggcttctttgataacagggaaaatatgttctccgaggaggccaagtccaccagcatcgccttcaggtgtatcaacgagaacctcacccgctacatttccaatatggacattttcgagaaggtggatgcgatcttcgataagcacgaggtgcaggagatcaaagagaagattctcaattccgattatgacgtcgaggatttcttcgaaggggagttctttaattttgtgctcacacaagagggcattgacgtgtacaacgcgattatcgggggcttcgtcacagagtccggggagaagattaaggggctgaatgagtacatcaatctgtacaatcagaagaccaagcagaaactgccgaaattcaagccgctctacaagcaagtcctgtccgatagggaaagcctctccttctacggcgagggctataccagcgacgaggaggtgctggaagtcttccgcaacacactgaataagaatagcgagattttctcctccatcaagaagctcgagaagctctttaagaactttgacgagtacagctccgccgggattttcgtgaagaacgggccggcgatcagcaccatctccaaggacatctttggcgagtggaacgtcatcagggacaagtggaacgccgagtacgacgacatccacctgaagaagaaggcggtggtgaccgagaagtatgaggacgatcgcaggaagtccttcaaaaaaatcggctccttcagcctcgaacagctccaggagtatgccgatgcggatctgtccgtcgtcgagaagctgaaggaaatcatcattcagaaggtcgacgagatctataaagtgtacgggtccagcgagaagctgttcgacgccgactttgtgctcgagaagtccctcaaaaagaatgacgccgtggtggccattatgaaagacctgctcgactccgtgaagtccttcgaaaattacattaaagcgttctttggggaggggaaggaaactaacagggatgagtccttctatggcgactttgtcctcgcgtacgacatcctgctgaaggtcgaccacatttacgacgcgatccgcaactacgtgacacagaagccgtactccaaagacaagttcaagctgtacttccagaacccgcaatttatggggggctgggacaaggataaagagacagactaccgcgcgacaattctccgctatggctccaaatactatctggccatcatggacaagaagtacgcgaagtgcctgcagaagatcgacaaagacgacgtcaatggcaactatgaaaagatcaactacaagctgctgccgggtccgaacaagatgctcccgaaggtgttcttcagcaagaagtggatggcctactacaatccaagcgaggatattcagaaaatctataaaaacgggaccttcaagaagggggacatgtttaacctcaacgactgccacaagctcattgatttcttcaaggatagcatttcccgctacccgaaatggtccaatgcgtacgattttaacttctccgagacagaaaagtacaaagacatcgcgggcttttacagggaggtggaggagcaagggtataaagtttcttttgaatccgcgagcaagaaggaagtcgacaagctcgtcgaggagggcaagctctacatgttccaaatttataacaaggacttttccgacaagagccatgggaccccaaacctccacaccatgtacttcaaactgctctttgacgagaacaaccacgggcaaatcaggctgagcggcggcgccgaattattcatgcgcagggcctccctcaagaaggaagagctggtcgtccatccagccaattccccgatcgcgaacaagaacccggacaatccgaaaaagaccaccaccctgtcctacgacgtctacaaggacaaacgcttcagcgaagaccagtacgaattacacatcccaattgcgattaataagtgcccaaagaatatcttcaaaattaatacagaggtcagggtgctgctcaaacacgacgacaatccgtatgtcatcggcattgacaggggcgagcgcaatctgctctatatcgtggtcgtggatgggaagggcaatattgtggagcagtactccctgaacgagattatcaacaacttcaatgggattaggattaagaccgactatcacagcctgctcgacaagaaagaaaaagagaggtttgaggcccgccaaaactggacctccattgagaatatcaaagaattaaaggccggctatatttcccaagtcgtccacaagatctgcgagctggtggagaaatatgacgccgtgattgcgctcgaagacttaaattctgggttcaagaactcccgcgtgaaggtggaaaaacaggtgtatcagaaattcgagaaaatgctgatcgacaaactcaattatatggtggataagaagtccaacccgtgtgccacagggggcgcgctgaagggctatcagatcaccaacaagttcgagagcttcaagagcatgagcacccagaacgggtttattttctacatcccggcgtggctcacctccaagattgacccgagcaccggcttcgtgaacctcctgaagacaaagtatacctccattgccgacagcaagaagtttatctcctccttcgaccgcattatgtatgtgccggaggaggacctcttcgagttcgccctcgactacaaaaacttcagccgcacagatgcggattacatcaagaagtggaagctgtactcctacgggaacaggatccgcatcttcaggaatccaaaaaaaaataacgtctttgactgggaggaagtgtgcctgacatccgcctacaaggaactgttcaataaatacggcatcaattaccagcagggcgacattcgcgccctcctctgtgagcagtccgacaaagcgttttactccagcttcatggccctcatgtccctgatgctccaaatgaggaatagcatcacagggcgcaccgacgtcgacttcctcatcagcccggtgaagaactccgacgggatcttttacgactcccgcaactatgaggcgcaagagaatgcgatcctcccgaagaacgccgatgcgaacggggcctataatatcgccaggaaagtgctctgggccatcgggcagttcaaaaaggcggaggatgagaagctcgacaaggtgaaaattgccatttccaacaaggagtggctggagtacgcgcagacctccgtgaagcacggctcctccgagacaccaggcacctccgagagcgcgacgcccgagggcggctccggcggctccggcagcccgccgcctgccctccctccaaagaggcgaagaagtggtggatcttccggggggtccccccctcctgctttacctccaaaaagacgtcgttctggtggttcaagtggaggttctccacctcctgcacttcctcccaagagaagaaggagcggcggcagctcaggaggatcaccaccaccagctttgccacccaaaaggcgccggtgaaagggctctctgtcatgatttcatactttcattattgagctctgtaattacaattatgaccatgagaacatctcttattgtgtggccttttaattgctgatgttagtactgaaccaaagcttatcgtgatgatgtaaaagcaataagtacttgtttgtagcttctttgtgtctccctttgggcttaatacatctgtttagtgttgtggctttggcatagacttctcttggtaataatgccttgcaatgcaaaatttcaattatcaaattctattatgttctcaccttatggtaacagcttaccctgtggaagatgagattcttgagttgagtcattgccaatttttggcattagcttttgaattagtgaattttgacaaaaattaccgtgacactgattttgttgaagctcttaagtgtagtttttacaaaatttcagtggctcgttgtgattatgtcaaactcacggcgaatgtagttcttacagaatttcagtggctccctgcaggctcgaggtcattcatatgcttgagaagagagtcgggatagtccaaaataaaacaaaggtaagattacctggtcaaaagtgaaaacatcagttaaaaggtggtataaagtaaaatatcggtaataaaaggtggcccaaagtgaaatttactcttttctactattataaaaattgaggatgtttttgtcggtactttgatacgtcatttttgtatgaattggtttttaagtttattcgcttttggaaatgcatatctgtatttgagtcgggttttaagttcgtttgcttttgtaaatacagagggatttgtataagaaatatctttagaaaaacccatatgctaatttgacataatttttgagaaaaatatatattcaggcgaattctcacaatgaacaataataagattaaaatagctttcccccgttgcagcgcatgggtattttttctagtaaaaataaaagataaacttagactcaaaacatttacaaaaacaacccctaaagttcctaaagcccaaagtgctatccacgatccatagcaagcccagcccaacccaacccaacccaacccaccccagtccagccaactggacaatagtctccacacccccccactatcaccgtgagttgtccgcacgcaccgcacgtctcgcagccaaaaaaaaaaagaaagaaaaaaaagaaaaagaaaaaacagcaggtgggtccgggtcgtgggggccggaaacgcgaggaggatcgcgagccagcgacgaggagcttaggcctcatcgttgaagatgcctctgccgacagtggtcccaaagatggacccccacccacgaggagcatcgtggaaaaagaagacgttccaaccacgtcttcaaagcaagtggattgatgtgatatctccactgacgtaagggatgacgcacaatcccactatccttcgaggcctcatcgttgaagatgcctctgccgacagtggtcccaaagatggacccccacccacgaggagcatcgtggaaaaagaagacgttccaaccacgtcttcaaagcaagtggattgatgtgatatctccactgacgtaagggatgacgcacaatcccactatccttcgaagctccctccctccgcttccaaagaaacgccccccatcgccactatatacatacccccccctctcctcccatccccccaacccttctagaaccatcttccacacactcaagccacactattggagaacacacagggacaacacaccataagatccaagggaggcctccgccgccgccggtaaccaccccgcccctctcctctttctttctccgtttttttttccgtctcggtctcgatctttggccttggtagtttgggtgggcgagaggcggcttcgtgcgcgcccagatcggtgcgcgggaggggcgggatctcgcggctggggctctcgccggcgtggatccggcccggatctcgcggggaatggggctctcggatgtagatctgcgatccgccgttgttgggggagatgatggggggtttaaaatttccgccgtgctaaacaagatcaggaagaggggaaaagggcactatggtttatatttttatatatttctgctgcttcgtcaggcttagatgtgctagatctttctttcttctttttgtgggtagaatttgaatccctcagcattgttcatcggtagtttttcttttcatgatttgtgacaaatgcagcctcgtgcggagcttttttgtaggtagaaggcggccgcatggcccagtctaagcacgggttgacgaaggagatgactatgaagtatcgcatggaaggctgcgttgacggccacaaattcgtcattaccggcgagggcatcggctacccctttaaggtaagtttctgcttctacctttgatatatatataataattatcattaattagtagtaatataatatttcaaatatttttttcaaaataaaagaatgtagtatatagcaattgcttttctgtagtttataagtgtgtatattttaatttataacttttctaatatatgaccaaaatttgttgatgtgcagggcaagcaagcgataaacctgtgcgtggtggagggtggccctctgcccttcgccgaggatatactctcagccgccttcatgtacgggaatcgggtgttcacggagtacccgcaagacatcgtggactacttcaagaactcctgccccgccggatacacatgggaccgttccttcctcttcgaggacggagccgtttgcatctgcaacgcggacatcaccgtgtccgtcgaggagaactgcatgtaccacgagtcaaagttctatggagtgaacttcccggccgatggtcccgtgatgaagaaaatgacggacaactgggagccgtcgtgcgagaaaatcattcccgtcccaaaacagggaatcctcaagggcgacgtgtcgatgtacctacttctcaaggacggtggacggctacggtgccagttcgacactgtttacaaggcgaagtcggtgccgaggaagatgccggactggcactttatccagcacaagctgacaagggaggacagaagcgacgctaagaaccagaaatggcacctcaccgagcacgccatcgccagtggctctgcgctgcccgggtgaccctgcaatgtgaccctagacttgtccatcttctggattggccaacttaattaatgtatgaaataaaaggatgcacacatagtgacatgctaatcactataatgtgggcatcaaagttgtgtgttatgtgtaattactaattatctgaataagagaaagagatcatccatatttcttatcctaaatgaatgtcacgtgtctttataattctttgatgaaccagatgcattttattaaccaattccatatacatataaatattaatcatatataattaatatcaattgggttagcaaaacaaatctagtctaggtgtgttttgctaattattgggggatagtgcaaaaagaaatctacgttctcaataattcagatagaaaacttaataaagtgagataatttacatagattgcttttatcctttgatatatgtgaaaccatgcatgatataaggaaaatagatagagaaataattttttacatcgttgaatatgtaaacaatttaattcaagaagctaggaatataaatattgaggagtttatgattattattattattttgatgttcaatgaagttttttttaatttcatatgaagtatacaaaaattcttcatagatttttgtttctatgccgtagttatctttaatatatttgtggttgaagaaatttattgctagaaacgaatggattgtcaatttttttttaaagcaaatatatatgaaattatactgtatattattttagtcatgattaaaatgtggccttaattgaatcatctttctcattcattttttcaaaagcatatcaggatgattgatatttatctattttaaaaattaatttaagggttcaaattaaatttaacttaaaagtgtcctaaccgtagttaaaggtttactttaaaaaaatactatgaaaaatctaatcttctatgaatcgagggcccttagctagttag

SEQ ID NO: 97 - DNA, 526 bp, unidentified
  source 1..526: mol_type = genomic DNA; note = Agrobacterium tumefaciens
ggagactcgaccagggtaatcagcacgtctgttcggcgcgcctatagctatggtttctcgcaatcgctttgggcagtcggttgtggcggtgcgtcttctgagacccgaaggttggcgattatctgctggaggtcttcgataccgtcttcgaagaacaagacatatgttcgctgagctcggacataggatagtcggcataggcggataccctcgccacgcaaatggcgcgatcgacaccctgatcggagcctgcgaagtgccacagtttattggaaccatcccccgttcattccgccctggaatttcacttcgacggcattctagatcctcgccgttgtcttagagagccatctttcgtcggcgcacccttaagtgcatggaaagccgttttcgcttcaaatgaaatcgaaaagaagaaaacaaaaatcctagagtaaccgaccctcccgataatcgtgaacatcagatgacagcatttcttccgaccgaagtggctgtgttggttatgagcttggggagatgggga

SEQ ID NO: 98 - DNA, 1647 bp, synthetic construct
  misc_feature 1..1647: note = Simian virus 40 (NLS) , Agrobacterium tumefaciens (VirD2), synthetic (Linker and SH3) fusion
  source 1..1647: mol_type = other DNA
atgagcggatcaaaaaaaagaaggatcaagcaagatgcggagtacgtgcgtgctttgtttgatttcaacggcaacgatgaagaagacctgccattcaaaaagggcgacatcctgcgtattcgtgataaaccggaagagcagtggtggaatgcagaggacagcgaaggtaagcgcggtatgatcccggttccgtatgtcgagaagtactccggtggaagttccggaggttcaagcgggtctgaaacgccgggcaccagcgagtcggcgaccccggaaagcagcggtggttcttccggcggtagcatgcccgatcgagctcaagttatcattcgcattgtgccgggaggtggcaccaagacccttcaacaaattatcaatcagttggagtatctatcccggaagggcaggctggagctgcagcgttcagcccgacatctcgatattcccctgccaccggatcaaatccacgaacttgcccgaagctgggttcaagagactggaacttatgacgaaagtcagccagacgaggaaaggcaacaggagttgaccacccatattattgtaagcttccccgccggtacaagccaggtagcggcttatgcggcgagccgggagtgggcagccgagatgtttgggtcaggcgcaggggggggccgatacaactatcttacggccttccacatcgatcgcgaccacccacatctgcatgtcgtcgtcaatcggcgcgaacttttaggacacggctggctgaagatatctcggcgccatccccaactgaattacgacgccctgcgcataaagatggccgagatttcacttcgtcatggcattgccctcgatgcgagccgacgagcagaacgtggcatcaccgagcggccgatcacttatgcccaatatcggcgccttgagcgggagcaggctcgccaaatccgtttcgaagacgcggatttggaacagtcgtcgccgcaaggagatcatccagaattcagccaacctttcgatacatccccatttgaagcatccgcgggcggaccggaggacatgcctcggcccaacaatcggcagaatgagtcgcaagttcatctccaggagccagctggtgtcagcaacgaagccggtgtccttgtgcgggttgcattggaaacggagcgccttgctcaaccattcgtttccgaaaccattctcgcggacgacatagggagcggctcttcgcgtgttgccgagggccgtgtggagagcgcaaaccgcactcccgatattcctcgcgcagcaactgaagctgccacgcacacgacacacgaccggcagcggcgtgcaaagcgtcctcatgatgacgacggagggccgagtggagcaaaacgtgtgacattggaaggcatcgcggttgggccccaggcgaacgccggcgaacaggatggcagtagtggccccttagtacggcaagctggaacgtcacggccatctccaccgacggccacgacgcgggccagcaccgcaaccgattcattgtctgctacagcccacctccagcaacggagaggtgtcctttcaaagcgtccgcgtgaagatgatgatggagaaccgagtgaacgcaaacgcgagagagatgagcgcagcaaggacgggcgtgggggaaataggagatag

SEQ ID NO: 99 - protein, 548 aa, synthetic construct
  REGION 1..548: note = Simian virus 40 (NLS) , Agrobacterium tumefaciens (VirD2), synthetic (Linker), Homo sapiens (SH3) fusion
MSGSKKRRIKQDAEYVRALFDFNGNDEEDLPFKKGDILRIRDKPEEQWWNAEDSEGKRGMIPVPYVEKYSGGSSGGSSGSETPGTSESATPESSGGSSGGSMPDRAQVIIRIVPGGGTKTLQQIINQLEYLSRKGRLELQRSARHLDIPLPPDQIHELARSWVQETGTYDESQPDEERQQELTTHIIVSFPAGTSQVAAYAASREWAAEMFGSGAGGGRYNYLTAFHIDRDHPHLHVVVNRRELLGHGWLKISRRHPQLNYDALRIKMAEISLRHGIALDASRRAERGITERPITYAQYRRLEREQARQIRFEDADLEQSSPQGDHPEFSQPFDTSPFEASAGGPEDMPRPNNRQNESQVHLQEPAGVSNEAGVLVRVALETERLAQPFVSETILADDIGSGSSRVAEGRVESANRTPDIPRAATEAATHTTHDRQRRAKRPHDDDGGPSGAKRVTLEGIAVGPQANAGEQDGSSGPLVRQAGTSRPSPPTATTRASTATDSLSATAHLQQRRGVLSKRPREDDDGEPSERKRERDERSKDGRGGNRR

SEQ ID NO: 100 - DNA, 505 bp, synthetic construct
  misc_feature 1..505: note = Ost1 HDR template - sense orientation
  source 1..505: mol_type = other DNA
aaaagattgacacattgcctatactacattctagcgtaggttaaatttatatcagataatgtgggagaaagagatcagttaccattgcatgacaatagctgaccccagatatgagttgttgaaagaagaaacgagcctgtggcatgacaatgggttaatagttacacaggaaatagagagctagcacaagcaaaagtaaacaaattgtataagaacctcatcctcattaaaacgccctgcattgcagattttctcaaatagttctccaccagatgcatattccattacaatgtctagatgagtcggtgttagaataacctgagtcaaatatcaaagaacattttccatgaatatgattattgtacctctgaacataaaaatatataaatacaaatatataccaacctccttaaacctgataatgttaggatgtcttagagacctgtgattaatgatttctcttttaacattttcatcaatctgtgacacacagcaaatgataggg

SEQ ID NO: 101 - DNA, 505 bp, synthetic construct
  misc_feature 1..505: note = Ost1 HDR template - antisense orientation
  source 1..505: mol_type = other DNA
ccctatcatttgctgtgtgtcacagattgatgaaaatgttaaaagagaaatcattaatcacaggtctctaagacatcctaacattatcaggtttaaggaggttggtatatatttgtatttatatatttttatgttcagaggtacaataatcatattcatggaaaatgttctttgatatttgactcaggttattctaacaccgactcatctagacattgtaatggaatatgcatctggtggagaactatttgagaaaatctgcaatgcagggcgttttaatgaggatgaggttcttatacaatttgtttacttttgcttgtgctagctctctatttcctgtgtaactattaacccattgtcatgccacaggctcgtttcttctttcaacaactcatatctggggtcagctattgtcatgcaatggtaactgatctctttctcccacattatctgatataaatttaacctacgctagaatgtagtataggcaatgtgtcaatctttt

SEQ ID NO: 102 - DNA, 3149 bp, synthetic construct
  misc_feature 1..3149: note = EF1alpha HDR template with aadA insertion
  source 1..3149: mol_type = other DNA
ttggtgtgaaacagatgatttgctgctgtaacaaagtaaattatgtctcgacttttaaggcccctttcattttattagattattttattttaattaatgttcttgtcccattttgcaacagatggatgctactacacccaagtattccaaggccaggtatgatgaaattgtgaaggaagtctcttcctacttgaagaaagtaggatacaaccctgacaagattccttttgttcctatctctggttttgagggagacaacatgattgagaggtccacaaaccttgactggtacaagggtccaactctgcttgatgcacttgaccagattagtgagcccaagaggccctctgacaagcccctcaggcttccccttcaggatgtgtacaagattggaggtattggaactgtgccagtgggacgtgttgagaccggtgtcttgaagcctggaatggtggtgacttttgcaccaactggactgacaactgaagtcaagtctgtggagatgcaccatgaatctcttacagaggcacatcctggtgacaatgtgggattcaatgttaagaatgttgctgttaaggatttgaagcgtggttatgttgcctcaaactcaaaggatgaccctgcaaaggaggctgctaacttcacagcccaagtcatcatcatgaaccaccctggtcagattggaaatggctatgcccctgtcctcgactgccacacttctcacattgctgtcaagtttgctgaactcatgaccaagattgacaggcgatccggcaaagagcttgagaaggagcccaagtttttgaagaacggtgatgctggttttgttaagatgattccaaccaaacccatggttgttgaaactttctccgagtatcctccacttggtaggtttgctgttagggacatgcgtcaaactgttgctgtgggagtcatcaagaacgttgagaagaaggatcctaccggagccaaggtcaccaaggctgcccagaagaagaagtcaaatgctgctgatgaagtggcaactcaattactgaattttgacctcttgaagcttgccggtgatgttgagtctaaccctggaccaatggcgcaagttagcagaatctgcaatggtgtgcagaacccatctcttatctccaatctctcgaaatccagtcaacgcaaatctcccttatcggtttctctgaagacgcagcagcatccacgagcttatccgatttcgtcgtcgtggggattgaagaagagtgggatgacgttaattggctctgagcttcgtcctcttaaggtcatgtcttctgtttccacggcgtgcatgggggaagcggtgatcgccgaagtatcgactcaactatcagaggtagttggcgtcatcgagcgccatctcgaaccgacgttgctggccgtacatttgtacggctccgcagtggatggcggcctgaagccacacagtgatattgatttgctggttacggtgaccgtaaggcttgatgaaacaacgcggcgagctttgatcaacgaccttttggaaacttcggcttcccctggagagagcgagattctccgcgctgtagaagtcaccattgttgtgcacgacgacatcattccgtggcgttatccagctaagcgcgaactgcaatttggagaatggcagcgcaatgacattcttgcaggtatcttcgagccagccacgatcgacattgatctggctatcttgctgacaaaagcaagagaacatagcgttgccttggtaggtccagcggcggaggaactctttgatccggttcctgaacaggatctatttgaggcgctaaatgaaaccttaacgctatggaactcgccgcccgactgggctggcgatgagcgaaatgtagtgcttacgttgtcccgcatttggtacagcgcagtaaccggcaaaatcgcgccgaaggatgtcgctgccgactgggcaatggagcgcctgccggcccagtatcagcccgtcatacttgaagctagacaggcttatcttggacaagaagaagatcgcttggcctcgcgcgcagatcagttggaagaatttgtccactacgtgaaaggcgagatcaccaaggtagtcggcaaatgaatcgtgcgggctggttcatcagggaatgttggctacaatcaatgttggtttcttttctgtactcttgtgtcttcttttctaggtagcttgtttttcggacaaagtttgaagtctccaccatcatctcgcaactgttgttcccagaactgggttcttgatcgacggtggcaaaattgcttttatttatctgtgttttaatgtgttgtgtttgtcggaacccctgattacatttttgttaagcgcagcgagtttcaggactttgctgcgttgtgttgctttggtttattaaatgtcaactttctatttgtagtgttcaatttttggcttggtttgctttttctttataatttgtgttcaaattttggcttggtttgcttttactataatttgtgttcaaattttgggttggattttttaacgatcggctgtttgctcttcttcctctgttttgatgtgttcgtgactatgcaagaatcttcaattttgctaaaataaacttgctttgacaacatagaatcaaatccgagtgctttaatattcggtggtttgtttttatttttggttttatgaaagttaaaattttaaaagtaaatcgataaggtataattgtggtttttatttatcgagaattttttaagtgaatcgatataatttatttcccctaaaataaaataccaaagaatcgaattcgaactttgtctttaataaaactactaatttaatcattatttgttctgtgtaagcatgagaaataaattctacttatcttttagtttaaaaccaaaacaggttaagaataatttttctaaggccgttatcaaggtcaccaaaaatctattcgatctgaccatatattttcgatacttgtacgattcgcagatgttgattggaaattgcaatgaataaattacaaatgccaaatccgattatgcaatgaatgaattacaagtgcatttatccgttttgaatctgttcatgtctaccaatgggagagatttttttcctgcatctgccatacatatgggaagaccgaaaatacttt

SEQ ID NO: 103 - DNA, 3149 bp, synthetic construct
  misc_feature 1..3149: note = EF1alpha HDR template with aadA insertion
  source 1..3149: mol_type = other DNA
aaagtattttcggtcttcccatatgtatggcagatgcaggaaaaaaatctctcccattggtagacatgaacagattcaaaacggataaatgcacttgtaattcattcattgcataatcggatttggcatttgtaatttattcattgcaatttccaatcaacatctgcgaatcgtacaagtatcgaaaatatatggtcagatcgaatagatttttggtgaccttgataacggccttagaaaaattattcttaacctgttttggttttaaactaaaagataagtagaatttatttctcatgcttacacagaacaaataatgattaaattagtagttttattaaagacaaagttcgaattcgattctttggtattttattttaggggaaataaattatatcgattcacttaaaaaattctcgataaataaaaaccacaattataccttatcgatttacttttaaaattttaactttcataaaaccaaaaataaaaacaaaccaccgaatattaaagcactcggatttgattctatgttgtcaaagcaagtttattttagcaaaattgaagattcttgcatagtcacgaacacatcaaaacagaggaagaagagcaaacagccgatcgttaaaaaatccaacccaaaatttgaacacaaattatagtaaaagcaaaccaagccaaaatttgaacacaaattataaagaaaaagcaaaccaagccaaaaattgaacactacaaatagaaagttgacatttaataaaccaaagcaacacaacgcagcaaagtcctgaaactcgctgcgcttaacaaaaatgtaatcaggggttccgacaaacacaacacattaaaacacagataaataaaagcaattttgccaccgtcgatcaagaacccagttctgggaacaacagttgcgagatgatggtggagacttcaaactttgtccgaaaaacaagctacctagaaaagaagacacaagagtacagaaaagaaaccaacattgattgtagccaacattccctgatgaaccagcccgcacgattcatttgccgactaccttggtgatctcgcctttcacgtagtggacaaattcttccaactgatctgcgcgcgaggccaagcgatcttcttcttgtccaagataagcctgtctagcttcaagtatgacgggctgatactgggccggcaggcgctccattgcccagtcggcagcgacatccttcggcgcgattttgccggttactgcgctgtaccaaatgcgggacaacgtaagcactacatttcgctcatcgccagcccagtcgggcggcgagttccatagcgttaaggtttcatttagcgcctcaaatagatcctgttcaggaaccggatcaaagagttcctccgccgctggacctaccaaggcaacgctatgttctcttgcttttgtcagcaagatagccagatcaatgtcgatcgtggctggctcgaagatacctgcaagaatgtcattgcgctgccattctccaaattgcagttcgcgcttagctggataacgccacggaatgatgtcgtcgtgcacaacaatggtgacttctacagcgcggagaatctcgctctctccaggggaagccgaagtttccaaaaggtcgttgatcaaagctcgccgcgttgtttcatcaagccttacggtcaccgtaaccagcaaatcaatatcactgtgtggcttcaggccgccatccactgcggagccgtacaaatgtacggccagcaacgtcggttcgagatggcgctcgatgacgccaactacctctgatagttgagtcgatacttcggcgatcaccgcttcccccatgcacgccgtggaaacagaagacatgaccttaagaggacgaagctcagagccaattaacgtcatcccactcttcttcaatccccacgacgacgaaatcggataagctcgtggatgctgctgcgtcttcagagaaaccgataagggagatttgcgttgactggatttcgagagattggagataagagatgggttctgcacaccattgcagattctgctaacttgcgccattggtccagggttagactcaacatcaccggcaagcttcaagaggtcaaaattcagtaattgagttgccacttcatcagcagcatttgacttcttcttctgggcagccttggtgaccttggctccggtaggatccttcttctcaacgttcttgatgactcccacagcaacagtttgacgcatgtccctaacagcaaacctaccaagtggaggatactcggagaaagtttcaacaaccatgggtttggttggaatcatcttaacaaaaccagcatcaccgttcttcaaaaacttgggctccttctcaagctctttgccggatcgcctgtcaatcttggtcatgagttcagcaaacttgacagcaatgtgagaagtgtggcagtcgaggacaggggcatagccatttccaatctgaccagggtggttcatgatgatgacttgggctgtgaagttagcagcctcctttgcagggtcatcctttgagtttgaggcaacataaccacgcttcaaatccttaacagcaacattcttaacattgaatcccacattgtcaccaggatgtgcctctgtaagagattcatggtgcatctccacagacttgacttcagttgtcagtccagttggtgcaaaagtcaccaccattccaggcttcaagacaccggtctcaacacgtcccactggcacagttccaatacctccaatcttgtacacatcctgaaggggaagcctgaggggcttgtcagagggcctcttgggctcactaatctggtcaagtgcatcaagcagagttggacccttgtaccagtcaaggtttgtggacctctcaatcatgttgtctccctcaaaaccagagataggaacaaaaggaatcttgtcagggttgtatcctactttcttcaagtaggaagagacttccttcacaatttcatcatacctggccttggaatacttgggtgtagtagcatccatctgttgcaaaatgggacaagaacattaattaaaataaaataatctaataaaatgaaaggggccttaaaagtcgagacataatttactttgttacagcagcaaatcatctgtttcacaccaa

SEQ ID NO: 104 - DNA, 3145 bp, synthetic construct
  misc_feature 1..3145: note = Polyubiquitin HDR template with aadA insertion
  source 1..3145: mol_type = other DNA
ttaggattttttttcacgaaattgcttcttgaaattacgtgatggattttgattctgatttatcttgtgattgttgactctacagatgcagatcttcgtcaagaccctcaccggaaagaccatcacccttgaggtggaaagctctgacaccatcgacaacgtcaaggccaagatccaggacaaggaaggaattcccccggatcagcaacgtctcatcttcgccggaaagcagctcgaggacggccgtaccctcgccgactacaacatccagaaggagtcaacccttcaccttgtccttcgtctccgtggtggcatgcagatcttcgtcaagactctcactggcaaaaccataaccctagaggtcgaaagctctgacaccattgacaacgtcaaggccaagatccaggacaaggagggaatccccccagaccagcaacgtctcatcttcgccggaaagcaacttgaggacgggcgcaccctcgccgactacaacatccagaaggaatcaacccttcacctcgtcctccgtctccgtggtggcatgcagatcttcgttaagaccctcaccggcaagactataaccctagaagtcgagagctccgacaccatcgacaacgtcaaggctaagatccaggacaaggagggtatccccccagaccagcagaggctgatcttcgccggcaagcagctcgaggacggacgtacccttgctgactacaacatccagaaggagtcaactctccacttggtgttgcgtcttcgtggtggtatgcagatcttcgtcaagacccttacgggtaagactattaccctcgaggtggagagctccgacaccattgacaatgtgaaggcgaagatccaggacaaggaaggaatcccaccggaccagcagaggcttatttttgctggcaaacagctagaggatggaaggaccctcgctgactacaacatccagaaggagtcaactctgcacttggtgttgcgtcttcgtggggggttttcaaatgctgctgatgaagtggcaactcaattactgaattttgacctcttgaagcttgccggtgatgttgagtctaaccctggaccaatggcgcaagttagcagaatctgcaatggtgtgcagaacccatctcttatctccaatctctcgaaatccagtcaacgcaaatctcccttatcggtttctctgaagacgcagcagcatccacgagcttatccgatttcgtcgtcgtggggattgaagaagagtgggatgacgttaattggctctgagcttcgtcctcttaaggtcatgtcttctgtttccacggcgtgcatgggggaagcggtgatcgccgaagtatcgactcaactatcagaggtagttggcgtcatcgagcgccatctcgaaccgacgttgctggccgtacatttgtacggctccgcagtggatggcggcctgaagccacacagtgatattgatttgctggttacggtgaccgtaaggcttgatgaaacaacgcggcgagctttgatcaacgaccttttggaaacttcggcttcccctggagagagcgagattctccgcgctgtagaagtcaccattgttgtgcacgacgacatcattccgtggcgttatccagctaagcgcgaactgcaatttggagaatggcagcgcaatgacattcttgcaggtatcttcgagccagccacgatcgacattgatctggctatcttgctgacaaaagcaagagaacatagcgttgccttggtaggtccagcggcggaggaactctttgatccggttcctgaacaggatctatttgaggcgctaaatgaaaccttaacgctatggaactcgccgcccgactgggctggcgatgagcgaaatgtagtgcttacgttgtcccgcatttggtacagcgcagtaaccggcaaaatcgcgccgaaggatgtcgctgccgactgggcaatggagcgcctgccggcccagtatcagcccgtcatacttgaagctagacaggcttatcttggacaagaagaagatcgcttggcctcgcgcgcagatcagttggaagaatttgtccactacgtgaaaggcgagatcaccaaggtagtcggcaaataagctggagctgatgtctgtgtgatgtctgatgttggattttcccagacattttaagaagaaatgtgatgtgtaatgggtctgtaatgacctttgaaaataagtttggtttgtgttgaactctattgtcccattaatgttactactgtttgttatcaatttgtggagctgatatataattatcaactgtatgctggcatattgtgtttgaattttgttctcaatccagtgaattggcgtatattagtgggttttttattcttcatgcttatcacggaggaaaagcagggatgagttgtgtgaaggatggtgatcatcccacgaattattagattttggtattataggttaaagatatttattaggtagggagaactcttggattagattctaaagtgatattttgaaaacacaccaaaggatttttgaacaaacggagatcatgatccctagtttcaattagctgccccttaccaagaggtagcaacttaaaaattatgctcgtgaagcatatttggtatcgtatataaattatgtaagcaatctgcttcagttggaacattaattggcttgcggaatgcacatttagatgatccacacaggtccacataaaaattcctaatcaattttagttatgcaatctttctgcttcaggtagtccttgtcttacagaaagcacattgagatgatccccacacagatccacataaaaaattcctaatcaataataacttgaaaatcattaaaagatgtaatgccatactaatccctaatttttgtgcaagtttttgtatactggaccccaaaaaataccaaaaagaaaaaacaagttattcagtgatatttttctgctccaatataaatttgattaccaaataccaaaaaataaaaacactattcagtggtatttttctgctccaatactggaccccaaattaatcagaatcggatccgtttaacagataaaaacaaaagcgatcgggttaaaatcccatttttacaaataacaacgcaggtttatacatgaaacaaatgtcatta

SEQ ID NO: 105 - DNA, 3145 bp, synthetic construct
  misc_feature 1..3145: note = Polyubiquitin HDR template with aadA insertion
  source 1..3145: mol_type = other DNA
taatgacatttgtttcatgtataaacctgcgttgttatttgtaaaaatgggattttaacccgatcgcttttgtttttatctgttaaacggatccgattctgattaatttggggtccagtattggagcagaaaaataccactgaatagtgtttttattttttggtatttggtaatcaaatttatattggagcagaaaaatatcactgaataacttgttttttctttttggtattttttggggtccagtatacaaaaacttgcacaaaaattagggattagtatggcattacatcttttaatgattttcaagttattattgattaggaattttttatgtggatctgtgtggggatcatctcaatgtgctttctgtaagacaaggactacctgaagcagaaagattgcataactaaaattgattaggaatttttatgtggacctgtgtggatcatctaaatgtgcattccgcaagccaattaatgttccaactgaagcagattgcttacataatttatatacgataccaaatatgcttcacgagcataatttttaagttgctacctcttggtaaggggcagctaattgaaactagggatcatgatctccgtttgttcaaaaatcctttggtgtgttttcaaaatatcactttagaatctaatccaagagttctccctacctaataaatatctttaacctataataccaaaatctaataattcgtgggatgatcaccatccttcacacaactcatccctgcttttcctccgtgataagcatgaagaataaaaaacccactaatatacgccaattcactggattgagaacaaaattcaaacacaatatgccagcatacagttgataattatatatcagctccacaaattgataacaaacagtagtaacattaatgggacaatagagttcaacacaaaccaaacttattttcaaaggtcattacagacccattacacatcacatttcttcttaaaatgtctgggaaaatccaacatcagacatcacacagacatcagctccagcttatttgccgactaccttggtgatctcgcctttcacgtagtggacaaattcttccaactgatctgcgcgcgaggccaagcgatcttcttcttgtccaagataagcctgtctagcttcaagtatgacgggctgatactgggccggcaggcgctccattgcccagtcggcagcgacatccttcggcgcgattttgccggttactgcgctgtaccaaatgcgggacaacgtaagcactacatttcgctcatcgccagcccagtcgggcggcgagttccatagcgttaaggtttcatttagcgcctcaaatagatcctgttcaggaaccggatcaaagagttcctccgccgctggacctaccaaggcaacgctatgttctcttgcttttgtcagcaagatagccagatcaatgtcgatcgtggctggctcgaagatacctgcaagaatgtcattgcgctgccattctccaaattgcagttcgcgcttagctggataacgccacggaatgatgtcgtcgtgcacaacaatggtgacttctacagcgcggagaatctcgctctctccaggggaagccgaagtttccaaaaggtcgttgatcaaagctcgccgcgttgtttcatcaagccttacggtcaccgtaaccagcaaatcaatatcactgtgtggcttcaggccgccatccactgcggagccgtacaaatgtacggccagcaacgtcggttcgagatggcgctcgatgacgccaactacctctgatagttgagtcgatacttcggcgatcaccgcttcccccatgcacgccgtggaaacagaagacatgaccttaagaggacgaagctcagagccaattaacgtcatcccactcttcttcaatccccacgacgacgaaatcggataagctcgtggatgctgctgcgtcttcagagaaaccgataagggagatttgcgttgactggatttcgagagattggagataagagatgggttctgcacaccattgcagattctgctaacttgcgccattggtccagggttagactcaacatcaccggcaagcttcaagaggtcaaaattcagtaattgagttgccacttcatcagcagcatttgaaaaccccccacgaagacgcaacaccaagtgcagagttgactccttctggatgttgtagtcagcgagggtccttccatcctctagctgtttgccagcaaaaataagcctctgctggtccggtgggattccttccttgtcctggatcttcgccttcacattgtcaatggtgtcggagctctccacctcgagggtaatagtcttacccgtaagggtcttgacgaagatctgcataccaccacgaagacgcaacaccaagtggagagttgactccttctggatgttgtagtcagcaagggtacgtccgtcctcgagctgcttgccggcgaagatcagcctctgctggtctggggggataccctccttgtcctggatcttagccttgacgttgtcgatggtgtcggagctctcgacttctagggttatagtcttgccggtgagggtcttaacgaagatctgcatgccaccacggagacggaggacgaggtgaagggttgattccttctggatgttgtagtcggcgagggtgcgcccgtcctcaagttgctttccggcgaagatgagacgttgctggtctggggggattccctccttgtcctggatcttggccttgacgttgtcaatggtgtcagagctttcgacctctagggttatggttttgccagtgagagtcttgacgaagatctgcatgccaccacggagacgaaggacaaggtgaagggttgactccttctggatgttgtagtcggcgagggtacggccgtcctcgagctgctttccggcgaagatgagacgttgctgatccgggggaattccttccttgtcctggatcttggccttgacgttgtcgatggtgtcagagctttccacctcaagggtgatggtctttccggtgagggtcttgacgaagatctgcatctgtagagtcaacaatcacaagataaatcagaatcaaaatccatcacgtaatttcaagaagcaatttcgtgaaaaaaaatcctaa

SEQ ID NO: 106 - DNA, 3149 bp, synthetic construct; identical to SEQ ID NO: 102
  misc_feature 1..3149: note = EF1alpha HDR template with aadA insertion
  source 1..3149: mol_type = other DNA

SEQ ID NO: 107 - DNA, 3149 bp, synthetic construct; identical to SEQ ID NO: 103
  misc_feature 1..3149: note = EF1alpha HDR template with aadA insertion
  source 1..3149: mol_type = other DNA

SEQ ID NO: 108 - DNA, 3145 bp, synthetic construct; identical to SEQ ID NO: 104
  misc_feature 1..3145: note = Polyubiquitin HDR template with aadA insertion
  source 1..3145: mol_type = other DNA

SEQ ID NO: 109 - DNA, 3145 bp, synthetic construct; identical to SEQ ID NO: 105
  misc_feature 1..3145: note = Polyubiquitin HDR template with aadA insertion
  source 1..3145: mol_type = other DNA

SEQ ID NO: 110 - DNA, 505 bp, synthetic construct; identical to SEQ ID NO: 100
  misc_feature 1..505: note = Ost1 HDR template - antisense orientation
  source 1..505: mol_type = other DNA

SEQ ID NO: 111 - DNA, 3145 bp, synthetic construct; identical to SEQ ID NO: 104
  misc_feature 1..3145: note = Polyubiquitin HDR template with aadA insertion
  source 1..3145: mol_type = other DNA

SEQ ID NO: 112 - DNA, 5382 bp, synthetic construct
  misc_feature 1..5382: note = Polyubiquitin Locus with aadA insertion
  source 1..5382: mol_type = other DNA
tttcatcgattataaattttcataatcagaagattcagcttttattaatgcaagaacgtccttaattgatgattttataaccgtaaattaggtctaattagagtttttttcataaagattttcagatccgtttacaacaagccttaattgttgattctgtagtcgtagattaaggtttttttcatgaactacttcagatccgttaaacaacagccttatttgttgatacttcagtcgtttttcaagaaattgttcagatccgttgataaaagccttattcgttgattctgtatggtatttcaagagatattgctcaggtcctttagcaactaccttatttgttgattctgtggccatagattaggattttttttcacgaaattgcttcttgaaattacgtgatggattttgattctgatttatcttgtgattgttgactctacagatgcagatcttcgtcaagaccctcaccggaaagaccatcacccttgaggtggaaagctctgacaccatcgacaacgtcaaggccaagatccaggacaaggaaggaattcccccggatcagcaacgtctcatcttcgccggaaagcagctcgaggacggccgtaccctcgccgactacaacatccagaaggagtcaacccttcaccttgtccttcgtctccgtggtggcatgcagatcttcgtcaagactctcactggcaaaaccataaccctagaggtcgaaagctctgacaccattgacaacgtcaaggccaagatccaggacaaggagggaatccccccagaccagcaacgtctcatcttcgccggaaagcaacttgaggacgggcgcaccctcgccgactacaacatccagaaggaatcaacccttcacctcgtcctccgtctccgtggtggcatgcagatcttcgttaagaccctcaccggcaagactataaccctagaagtcgagagctccgacaccatcgacaacgtcaaggctaagatccaggacaaggagggtatccccccagaccagcagaggctgatcttcgccggcaagcagctcgaggacggacgtacccttgctgactacaacatccagaaggagtcaactctccacttggtgttgcgtcttcgtggtggtatgcagatcttcgtcaagacccttacgggtaagactattaccctcgaggtggagagctccgacaccattgacaatgtgaaggcgaagatccaggacaaggaaggaatcccaccggaccagcagaggcttatttttgctggcaaacagctagaggatggaaggaccctcgctgactacaacatccagaaggagtcaactctgcacttggtgttgcgtcttcgtggggggttttcaaatgctgctgatgaagtggcaactcaattactgaattttgacctcttgaagcttgccggtgatgttgagtctaaccctggaccaatggcgcaagttagcagaatctgcaatggtgtgcagaacccatctcttatctccaatctctcgaaatccagtcaacgcaaatctcccttatcggtttctctgaagacgcagcagcatccacgagcttatccgatttcgtcgtcgtggggattgaagaagagtgggatgacgttaattggctctgagcttcgtcctcttaaggtcatgtcttctgtttccacggcgtgcatgggggaagcggtgatcgccgaagtatcgactcaactatcagaggtagttggcgtcatcgagcgccatctcgaaccgacgttgctggccgtacatttgtacggctccgcagtggatggcggcctgaagccacacagtgatattgatttgctggttacggtgaccgtaaggcttgatgaaacaacgcggcgagctttgatcaacgaccttttggaaacttcggcttcccctggagagagcgagattctccgcgctgtagaagtcaccattgttgtgcacgacgacatcattccgtggcgttatccagctaagcgcgaactgcaatttggagaatggcagcgcaatgacattcttgcaggtatcttcgagccagccacgatcgacattgatctggctatcttgctgacaaaagcaagagaacatagcgttgccttggtaggtccagcggcggaggaactctttgatccggttcctgaacaggatctatttgaggcgctaaatgaaaccttaacgctatggaactcgccgcccgactgggctggcgatgagcgaaatgtagtgcttacgttgtcccgcatttggtacagcgcagtaaccggcaaaatcgcgccgaaggatgtcgctgccgactgggcaatggagcgcctgccggcccagtatcagcccgtcatacttgaagctagacaggcttatcttggacaagaagaagatcgcttggcctcgcgcgcagatcagttggaagaatttgtccactacgtgaaaggcgagatcaccaaggtagtcggcaaataagctggagctgatgtctgtgtgatgtctgatgttggattttcccagacattttaagaagaaatgtgatgtgtaatgggtctgtaatgacctttgaaaataagtttggtttgtgttgaactctattgtcccattaatgttactactgtttgttatcaatttgtggagctgatatataattatcaactgtatgctggcatattgtgtttgaattttgttctcaatccagtgaattggcgtatattagtgggttttttattcttcatgcttatcacggaggaaaagcagggatgagttgtgtgaaggatggtgatcatcccacgaattattagattttggtattataggttaaagatatttattaggtagggagaactcttggattagattctaaagtgatattttgaaaacacaccaaaggatttttgaacaaacggagatcatgatccctagtttcaattagctgccccttaccaagaggtagcaacttaaaaattatgctcgtgaagcatatttggtatcgtatataaattatgtaagcaatctgcttcagttggaacattaattggcttgcggaatgcacatttagatgatccacacaggtccacataaaaattcctaatcaattttagttatgcaatctttctgcttcaggtagtccttgtcttacagaaagcacattgagatgatccccacacagatccacataaaaaattcctaatcaataataacttgaaaatcattaaaagatgtaatgccatactaatccctaatttttgtgcaagtttttgtatactggaccccaaaaaataccaaaaagaaaaaacaagttattcagtgatatttttctgctccaatataaatttgattaccaaataccaaaaaataaaaacactattcagtggtatttttctgctccaatactggaccccaaattaatcagaatcggatccgtttaacagataaaaacaaaagcgatcgggttaaaatcccatttttacaaataacaacgcaggtttatacatgaaacaaatgtcattaccaagtgatatttttctgctccgatataaatttgattacaacgaaaaaaagtggtctactcacatgtttctccattttacttgtgtataaaactcatttcaagttgtatctgattcgtcgaaaaaacaaaacagaatagtaatactctataccctttttatcatcattaattttgtaattatatggattaataaaaggttcctcccagagttaaattgttgtgttggcgtgcgtgtagagcttctcttccaacaagagacaagcttgagatcgtggagtaacctgtcccttaacgtgctctttgttctctttgtgcgagggtggcattgaaaatacatttcacgtgcttacagtttgcccgaggatcatggaatgctggcagaagttggggttgagcagcagaagttgatagaattcttcttcaaactcatgctttctattgaatcttatcaacaatgtagagtagctataactctctggagagtgcttggagatgtcactatgatgctgtttgaggagggactatcacggattccgccatcgtgatcagcagagatgacatgttttatcaagattgggttcgtgcacaactagcaaataaatttagacaggttgcagaattgatggagatgaatgattcttggagtccaccggccattggaaggttaaaatgtaacgttgatgcatctctcaatcatattcaaaactgcacagtttttggtttatgcattcgggcatcttattgttgccagaattgatgttgtgaaaccatgcatgcctgttatggagggagaggcgttagggttgctgttggcgattcagttttttctatatgcgggaatgcaaaatgtggactttgaaacagattgtaaagggtgtgttgatagaaaaataaaataaaatacccacccttgatattagcagaggaaatattttctgtaaatgtaaaattttgttacaacccgctcttttattttcttttatagagcaattctctacacttgtctaagaatctataatacttacattactaatcttactaacacaagcttcttgtaggtatgtctggatggagaattttagaagaaaagtgatttttttttaattttttaattaaaggagttgtacaatgttgtgagaaaaaaactaggaaatattaaatgatttcatcataaaacatcgttttactattttttttattttggtaaattgctccaataaataaatcttatgtaaaccactttttagtatatattaaaaaaatattatttatgagtgctacattctctaagaggaagatggtctattattacttgggagcccatttcttcagcatacgatgcacaaataagccgctagtgctaattcaattttggggttatctaactatccttccggcgaaacttgatgcaggaaaacgtttgtttaatacttgacatgaattcaacgaacaacctctttgaggggacaatcagaagcacaaaccaagcaccgaatcatccaagtttgctatcttacgcaaggcattaggtataaacctagtttgaataaatttttcaagtactcgtaggaaataaatacaggtaaaataaatcaaacatctataagatcaatccaacttatagacactttagtttttctagaagttagacgaaaaaacttgtaaaaaagacaaaatgctgcacaagttaattttaatttatgaccaaagttttattcattttatcaaccttattttcttcttccataaatatttgttgaaaagcttattcaaattggaccatagagcatgttggaatgagaattttagcacgttactcaatccaacagcatcataacaacttaatggaaccggaattttcacgccatggcatatg

SEQ ID NO: 113 - DNA, 40 bp, synthetic construct
  misc_feature 1..40: note = Polyubiquitin left flank primer
  source 1..40: mol_type = other DNA
ggtatttcaagagatattgctcaggtcctttagcaactac

SEQ ID NO: 114 - DNA, 27 bp, synthetic construct
  misc_feature 1..27: note = aadA specific primer for left flank PCR
  source 1..27: mol_type = other DNA
gggttctgcacaccattgcagattctg

SEQ ID NO: 115 - DNA, 18505 bp, synthetic construct
  misc_feature 1..18505: note = pWISE3091 Full Plasmid Sequence
  source 1..18505: mol_type = other DNA
agcttactagtcaacaattggccaatctttgttctaaattgctaataaacgaccatttccgtcaattctccttggttgcaacagtctacccgtcaaatgtttactaatttataagtgtgaagtttgaattatgaaagacgaaatcgtattaaaaattcacaagaataaacaactccatagattttcaaaaaaacagtcacgagaaaaaaaccacagtccgtttgtctgctcttctagtttttattatttttctattaatagttttttgttatttcgagaataaaatttgaacgatgtccgaaccacaaaagccgagccgataaatcctaagccgagcctaactttagccgtaaccatcagtcacggctcccgggctaattcatttgaaccgaatcataatcaacggtttagatcaaactcaaaacaatctaacggcaacatagacgcgtcggtgagctaaaaagagtgtgaaagccaggtcaccatagcattgtctctcccagattttttatttgggaaataatagaagaaatagaaaaaaataaaagagtgagaaaaatcgtagagctatatattcgcacatgtactcgtttcgctttccttagtgttagctgctgccgctgttgtttctcctccatttctctatctttctctctcgctgcttctcgaatcttctgtatcatcttcttcttcttcaaggtgagtctctagatccgttcgcttgattttgctgctcgttagtcgttattgttgattctctatgccgatttcgctagatctgtttagcatgcgttgtggttttatgagaaaatctttgttttgggggttgcttgttatgtgattcgatccgtgcttgttggatcgatctgagctaattcttaaggtttatgtgttagatctatggagtttgaggattcttctcgcttctgtcgatctctcgctgttatttttgtttttttcagtgaagtgaagttgtttagttcgaaatgacttcgtgtatgctcgattgatctggttttaatcttcgatctgttaggtgttgatgtttacaagtgaattctagtgttttctcgttgagatctgtgaagtttgaacctagttttctcaataatcaacatatgaagcgatgtttgagtttcaataaacgctgctaatcttcgaaactaagttgtgatctgattcgtgtttacttcatgagcttatccaattcatttcggtttcattttactttttttttagtgaaccatggcgcaagttagcagaatctgcaatggtgtgcagaacccatctcttatctccaatctctcgaaatccagtcaacgcaaatctcccttatcggtttctctgaagacgcagcagcatccacgagcttatccgatttcgtcgtcgtggggattgaagaagagtgggatgacgttaattggctctgagcttcgtcctcttaaggtcatgtcttctgtttccacggcgtgcatgggggaagcggtgatcgccgaagtatcgactcaactatcagaggtagttggcgtcatcgagcgccatctcgaaccgacgttgctggccgtacatttgtacggctccgcagtggatggcggcctgaagccacacagtgatattgatttgctggttacggtgaccgtaaggcttgatgaaacaacgcggcgagctttgatcaacgaccttttggaaacttcggcttcccctggagagagcgagattctccgcgctgtagaagtcaccattgttgtgcacgacgacatcattccgtggcgttatccagctaagcgcgaactgcaatttggagaatggcagcgcaatgacattcttgcaggtatcttcgagccagccacgatcgacattgatctggctatcttgctgacaaaagcaagagaacatagcgttgccttggtaggtccagcggcggaggaactctttgatccggttcctgaacaggatctatttgaggcgctaaatgaaaccttaacgctatggaactcgccgcccgactgggctggcgatgagcgaaatgtagtgcttacgttgtcccgcatttggtacagcgcagtaaccggcaaaatcgcgccgaaggatgtcgctgccgactgggcaatggagcgcctgccggcccagtatcagcccgtcatacttgaagctagacaggcttatcttggacaagaagaagatcgcttggcctcgcgcgcagatcagttggaagaatttgtccactacgtgaaaggcgagatcaccaaggtagtcggcaaataaggatcaattcccgatcgttcaaacatttggcaataaagtttcttaagattgaatcctgttgccggtcttgcgatgattatcatataatttctgttgaattacgttaagcatgtaataattaacatgtaatgcatgacgttatttatgagatgggtttttatgattagagtcccgcaattatacatttaatacgcgatagaaaacaaaatatagcgcgcaaactaggataaattatcgcgcgcggtgtcatctatgttactagatcggtacctacgcgtagctagcccgtgaagtttctcatctaagcccccatttggacgtgaatgtagacacgtcgaaataaagatttccgaattagaataatttgtttattgctttcgcctataaatacgacggatcgtaatttgtcgttttatcaaaatgtactttcattttataataacgctgcggacatctacatttttgaattgaaaaaaaattggtaattactctttctttttctccatattgaccatcatactcattgctgatccatgtagatttcccggacatgaagccatttacaattgaatatatcctgccgccgctgccgctttgcacccggtggagcttgcatgttggtttctacgcagaactgagccggttaggcagataatttccattgagaactgagccatgtgcaccttccccccaacacggtgagcgacggggcaacggagtgatccacatgggacttttcctagcttggctgccatttttggggtgaggccgttcgcggccgaggggcgcagcccctggggggatgggaggcccgcgttagcgggccgggagggttcgagaagggggggcaccccccttcggcgtgcgcggtcacgcgcacagggcgcagccctggttaaaaacaaggtttataaatattggtttaaaagcaggttaaaagacaggttagcggtggccgaaaaacgggcggaaacccttgcaaatgctggattttctgcctgtggacagcccctcaaatgtcaataggtgcgcccctcatctgtcagcactctgcccctcaagtgtcaaggatcgcgcccctcatctgtcagtagtcgcgcccctcaagtgtcaataccgcagggcacttatccccaggcttgtccacatcatctgtgggaaactcgcgtaaaatcaggcgttttcgccgatttgcgaggctggccagctccacgtcgccggccgaaatcgagcctgcccctcatctgtcaacgccgcgccgggtgagtcggcccctcaagtgtcaacgtccgcccctcatctgtcagtgagggccaagttttccgcgaggtatccacaacgccggcggccggccgcggtgtctcgcacacggcttcgacggcgtttctggcgcgtttgcagggccatagacggccgccagcccagcggcgagggcaaccagcccggtgagcgtcggaaagggtcgatcgaccgatgcccttgagagccttcaacccagtcagctccttccggtgggcgcggggcatgactatcgtcgccgcacttatgactgtcttctttatcatgcaactcgtaggacaggtgccggcagcgctctgggtcattttcggcgaggaccgctttcgctggagcgcgacgatgatcggcctgtcgcttgcggtattcggaatcttgcacgccctcgctcaagccttcgtcactggtcccgccaccaaacgtttcggcgagaagcaggccattatcgccggcatggcggccgacgcgctgggctacgtcttgctggcgttcgcgacgcgaggctggatggccttccccattatgattcttctcgcttccggcggcatcgggatgcccgcgttgcaggccatgctgtccaggcaggtagatgacgaccatcagggacagcttcaaggatcgctcgcggctcttaccagcctaacttcgatcattggaccgctgatcgtcacggcgatttatgccgcctcggcgagcacatggaacgggttggcatggattgtaggcgccgccctataccttgtctgcctccccgcgttgcgtcgcggtgcatggagccgggccacctcgacctgaatggaagccggcggcacctcgctaacggattcaccactccaagaattggagccaatcaattcttgcggagaactgtgaatgcgcaaaccaacccttggcagaacatatccatcgcgtccgccatctccagcagccgcacgcggcgcatctcgggcagcgttgggtcctggccacgggtgcgcatgatcgtgctcctgtcgttgaggacccggctaggctggcggggttgccttactggttagcagaatgaatcaccgatacgcgagcgaacgtgaagcgactgctgctgcaaaacgtctgcgacctgagcaacaacatgaatggtcttcggtttccgtgtttcgtaaagtctggaaacgcggaagtcagcgccctgcaccattatgttccggatctgcatcgcaggatgctgctggctaccctgtggaacacctacatctgtattaacgaagcgctggcattgaccctgagtgatttttctctggtcccgccgcatccataccgccagttgtttaccctcacaacgttccagtaaccgggcatgttcatcatcagtaacccgtatcgtgagcatcctctctcgtttcatcggtatcattacccccatgaacagaaatcccccttacacggaggcatcagtgaccaaacaggaaaaaaccgcccttaacatggcccgctttatcagaagccagacattaacgcttctggagaaactcaacgagctggacgcggatgaacaggcagacatctgtgaatcgcttcacgaccacgctgatgagctttaccgcagctgcctcgcgcgtttcggtgatgacggtgaaaacctctgacacatgcagctcccggagacggtcacagcttgtctgtaagcggatgccgggagcagacaagcccgtcagggcgcgtcagcgggtgttggcgggtgtcggggcgcagccatgacccagtcacgtagcgatagcggagtgtatactggcttaactatgcggcatcagagcagattgtactgagagtgcaccatatgcggtgtgaaataccgcacagatgcgtaaggagaaaataccgcatcaggcgctcttccgcttcctcgctcactgactcgctgcgctcggtcgttcggctgcggcgagcggtatcagctcactcaaaggcggtaatacggttatccacagaatcaggggataacgcaggaaagaacatgtgagcaaaaggccagcaaaaggccaggaaccgtaaaaaggccgcgttgctggcgtttttccataggctccgcccccctgacgagcatcacaaaaatcgacgctcaagtcagaggtggcgaaacccgacaggactataaagataccaggcgtttccccctggaagctccctcgtgcgctctcctgttccgaccctgccgcttaccggatacctgtccgcctttctcccttcgggaagcgtggcgctttctcatagctcacgctgtaggtatctcagttcggtgtaggtcgttcgctccaagctgggctgtgtgcacgaaccccccgttcagcccgaccgctgcgccttatccggtaactatcgtcttgagtccaacccggtaagacacgacttatcgccactggcagcagccactggtaacaggattagcagagcgaggtatgtaggcggtgctacagagttcttgaagtggtggcctaactacggctacactagaaggacagtatttggtatctgcgctctgctgaagccagttaccttcggaaaaagagttggtagctcttgatccggcaaacaaaccaccgctggtagcggtggtttttttgtttgcaagcagcagattacgcgcagaaaaaaaggatctcaagaagatcctttgatcttttctacggggtctgacgctcagtggaacgaaaactcacgttaagggattttggtcatgagattatcaaaaaggatcttcacctagatccttttaaattaaaaatgaagttttaaatcaatctaaagtatatatgagtaaacttggtctgacagttaccaatgcttaatcagtgaggcacctatctcagcgatctgtctatttcgttcatccatagttgcctgactccccgtcgtgtagataactacgatacgggagggcttaccatctggccccagtgctgcaatgataccgcgagacccacgctcaccggctccagatttatcagcaataaaccagccagccggaagggccgagcgcagaagtggtcctgcaactttatccgcctccatccagtctattaattgttgccgggaagctagagtaagtagttcgccagttaatagtttgcgcaacgttgttgccattgctgcaggtcgggagcacaggatgacgcctaacaattcattcaagccgacaccgcttcgcggcgcggcttaattcaggagttaaacatcatgagggaagcggtgatcgccgaagtatcgactcaactatcagaggtagttggcgtcatcgagcgccatctcgaaccgacgttgctggccgtacatttgtacggctccgcagtggatggcggcctgaagccacacagtgatattgatttgctggttacggtgaccgtaaggcttgatgaaacaacgcggcgagctttgatcaacgaccttttggaaacttcggcttcccctggagagagcgagattctccgcgctgtagaagtcaccattgttgtgcacgacgacatcattccgtggcgttatccagctaagcgcgaactgcaatttggagaatggcagcgcaatgacattcttgcaggtatcttcgagccagccacgatcgacattgatctggctatcttgctgacaaaagcaagagaacatagcgttgccttggtaggtccagcggcggaggaactctttgatccggttcctgaacaggatctatttgaggcgctaaatgaaaccttaacgctatggaactcgccgcccgactgggctggcgatgagcgaaatgtagtgcttacgttgtcccgcatttggtacagcgcagtaaccggcaaaatcgcgccgaaggatgtcgctgccgactgggcaatggagcgcctgccggcccagtatcagcccgtcatacttgaagctaggcaggcttatcttggacaagaagatcgcttggcctcgcgcgcagatcagttggaagaatttgttcactacgtgaaaggcgagatcaccaaggtagtcggcaaataatgtctaacaattcgttcaagccgacgccgcttcgcggcgcggcttaactcaagcgttagatgctgcaggcatcgtggtgtcacgctcgtcgtttggtatggcttcattcagctccggttcccaacgatcaaggcgagttacatgatcccccatgttgtgcaaaaaagcggttagctccttcggtcctccgatcgaggatttttcggcgctgcgctacgtccgcgaccgcgttgagggatcaagccacagcagcccactcgaccttctagccgacccagacgagccaagggatctttttggaatgctgctccgtcgtcaggctttccgacgtttgggtggttgaacagaagtcattatcgcacggaatgccaagcactcccgaggggaaccctgtggttggcatgcacatacaaatggacgaacggataaaccttttcacgcccttttaaatatccgattattctaataaacgctcttttctcttaggtttacccgccaatatatcctgtcaaacactgatagtttaaactgaaggcgggaaacgacaatctggcgcgccactgttaataatttttaaacgtcagcgcactaaaaaaacgaaaagacggacacgtgaaaataaaaaacacacactagtttatgacgcaatactattttacttatgatttgggtacattagacaaaaccgtgaaagagatgtatcagctatgaaacctgtatacttcaatacagagacttactcatatcggatacgtacgcacgaagtatcatattaattattttaatttttaataaatattttatcggatacttatgtgatactctacatatacacaaggatatttctaagatactttatagatacgtatcctagaaaaacatgaagagtaaaaaagtgagacaatgttgtaaaaattcattataaatgtatatgattcaattttagatatgcatcagtataattgattctcgatgaaacacttaaaattatatttcttgtggaagaacgtagcgagagaggtgattcagttagacaacattaaataaaattaatgttaagttcttttaatgatgtttctctcaatatcacatcatatgaaaatgtaatatgatttataagaaaatttttaaaaaatttattttaataatcacatgtactattttttaaaaattgtatcttttataataatacaataataaagagtaatcagtgttaatttttcttcaaatataagttttattataaatcattgttaacgtatcataagtcattaccgtatcgtatcttaatttttttttaaaaaccgctaattcacgtacccgtattgtattgtacccgcacctgtatcacaatcgatcttagttagaagaattgtctcgaggcggtgcaagacagcatataatagacgtggactctcttataccaaacgttgtcgtatcacaaagggttaggtaacaagtcacagtttgtccacgtgtcacgttttaattggaagaggtgccgttggcgtaatataacagccaatcgatttttgctataaaagcaaatcaggtaaactaaacttcttcattcttttcttccccatcgctacaaaaccggttcctttggaaaagagattcattcaaacctagcacccaattccgtttcaaggtataatctactttctattcttcgattattttattattattagctactatcgtttaatcgatcttttcttttgatccgtcaaatttaaattcaattagggttttgttcttttctttcatctgattgaaatccttctgaattgaaccgtttacttgattttactgtttattgtatgatttaatcctttgtttttcaaagacagtctttagattgtgattaggggttcatataaatttttagatttggatttttgtattgtatgattcaaaaaatacgtcctttaattagattagtacatggatattttttacccgatttattgattgtcagggagaatttgatgagcaagtttttttgatgtctgttgtaaattgaattgattataattgctgatctgctgcttccagttttcataacccatattcttttaaccttgttgtacacacaatgaaaaattggtgattgattcatttgtttttctttgttttggattatacagggtatggcgccgccgcctgccctccctccaaagaggcgaagaagtggtggatcttccggggggtccccccctcctgctttacctccaaaaagacgtcgttctggtggttcaagtggaggttctccacctcctgcacttcctcccaagagaagaaggagcggcggcagctcaggaggatcaccaccaccagctttgccacccaaaaggcgccggggctcctccgagacaccaggcacctccgagagcgcgacgcccgagggcggctccggcggctccggcagctccaagctggagaagtttacaaactgttacagcctctccaaaaccctcaggtttaaagcgatcccggtgggcaagacccaggagaacatcgacaacaagaggctcctggtggaagacgagaagcgcgccgaagactacaagggcgtgaagaagctgctcgataggtactacctcagctttattaacgacgtgctgcacagcatcaaactcaagaatctcaacaactacatctccctcttccgcaaaaagacccgcaccgagaaggagaacaaggagctggagaacctggagatcaacctccgcaaggaaatcgccaaagcgttcaagggcaatgaagggtacaagagcctcttcaagaaagacatcatcgaaactatcctcccagagtttctcgatgacaaggacgagatcgcgctggtgaactcctttaacgggttcacaaccgcgtttaccggcttctttgataacagggaaaatatgttctccgaggaggccaagtccaccagcatcgccttcaggtgtatcaacgagaacctcacccgctacatttccaatatggacattttcgagaaggtggatgcgatcttcgataagcacgaggtgcaggagatcaaagagaagattctcaattccgattatgacgtcgaggatttcttcgaaggggagttctttaattttgtgctcacacaagagggcattgacgtgtacaacgcgattatcgggggcttcgtcacagagtccggggagaagattaaggggctgaatgagtacatcaatctgtacaatcagaagaccaagcagaaactgccgaaattcaagccgctctacaagcaagtcctgtccgatagggaaagcctctccttctacggcgagggctataccagcgacgaggaggtgctggaagtcttccgcaacacactgaataagaatagcgagattttctcctccatcaagaagctcgagaagctctttaagaactttgacgagtacagctccgccgggattttcgtgaagaacgggccggcgatcagcaccatctccaaggacatctttggcgagtggaacgtcatcagggacaagtggaacgccgagtacgacgacatccacctgaagaagaaggcggtggtgaccgagaagtatgaggacgatcgcaggaagtccttcaaaaaaatcggctccttcagcctcgaacagctccaggagtatgccgatgcggatctgtccgtcgtcgagaagctgaaggaaatcatcattcagaaggtcgacgagatctataaagtgtacgggtccagcgagaagctgttcgacgccgactttgtgctcgagaagtccctcaaaaagaatgacgccgtggtggccattatgaaagacctgctcgactccgtgaagtccttcgaaaattacattaaagcgttctttggggaggggaaggaaactaacagggatgagtccttctatggcgactttgtcctcgcgtacgacatcctgctgaaggtcgaccacatttacgacgcgatccgcaactacgtgacacagaagccgtactccaaagacaagttcaagctgtacttccagaacccgcaatttatggggggctgggacaaggataaagagacagactaccgcgcgacaattctccgctatggctccaaatactatctggccatcatggacaagaagtacgcgaagtgcctgcagaagatcgacaaagacgacgtcaatggcaactatgaaaagatcaactacaagctgctgccgggtccgaacaagatgctcccgaaggtgttcttcagcaagaagtggatggcctactacaatccaagcgaggatattcagaaaatctataaaaacgggaccttcaagaagggggacatgtttaacctcaacgactgccacaagctcattgatttcttcaaggatagcatttcccgctacccgaaatggtccaatgcgtacgattttaacttctccgagacagaaaagtacaaagacatcgcgggcttttacagggaggtggaggagcaagggtataaagtttcttttgaatccgcgagcaagaaggaagtcgacaagctcgtcgaggagggcaagctctacatgttccaaatttataacaaggacttttccgacaagagccatgggaccccaaacctccacaccatgtacttcaaactgctctttgacgagaacaaccacgggcaaatcaggctgagcggcggcgccgaattattcatgcgcagggcctccctcaagaaggaagagctggtcgtccatccagccaattccccgatcgcgaacaagaacccggacaatccgaaaaagaccaccaccctgtcctacgacgtctacaaggacaaacgcttcagcgaagaccagtacgaattacacatcccaattgcgattaataagtgcccaaagaatatcttcaaaattaatacagaggtcagggtgctgctcaaacacgacgacaatccgtatgtcatcggcattgacaggggcgagcgcaatctgctctatatcgtggtcgtggatgggaagggcaatattgtggagcagtactccctgaacgagattatcaacaacttcaatgggattaggattaagaccgactatcacagcctgctcgacaagaaagaaaaagagaggtttgaggcccgccaaaactggacctccattgagaatatcaaagaattaaaggccggctatatttcccaagtcgtccacaagatctgcgagctggtggagaaatatgacgccgtgattgcgctcgaagacttaaattctgggttcaagaactcccgcgtgaaggtggaaaaacaggtgtatcagaaattcgagaaaatgctgatcgacaaactcaattatatggtggataagaagtccaacccgtgtgccacagggggcgcgctgaagggctatcagatcaccaacaagttcgagagcttcaagagcatgagcacccagaacgggtttattttctacatcccggcgtggctcacctccaagattgacccgagcaccggcttcgtgaacctcctgaagacaaagtatacctccattgccgacagcaagaagtttatctcctccttcgaccgcattatgtatgtgccggaggaggacctcttcgagttcgccctcgactacaaaaacttcagccgcacagatgcggattacatcaagaagtggaagctgtactcctacgggaacaggatccgcatcttcaggaatccaaaaaaaaataacgtctttgactgggaggaagtgtgcctgacatccgcctacaaggaactgttcaataaatacggcatcaattaccagcagggcgacattcgcgccctcctctgtgagcagtccgacaaagcgttttactccagcttcatggccctcatgtccctgatgctccaaatgaggaatagcatcacagggcgcaccgacgtcgacttcctcatcagcccggtgaagaactccgacgggatcttttacgactcccgcaactatgaggcgcaagagaatgcgatcctcccgaagaacgccgatgcgaacggggcctataatatcgccaggaaagtgctctgggccatcgggcagttcaaaaaggcggaggatgagaagctcgacaaggtgaaaattgccatttccaacaaggagtggctggagtacgcgcagacctccgtgaagcactgaaagggctctctgtcatgatttcatactttcattattgagctctgtaattacaattatgaccatgagaacatctcttattgtgtggccttttaattgctgatgttagtactgaaccaaagcttatcgtgatgatgtaaaagcaataagtacttgtttgtagcttctttgtgtctccctttgggcttaatacatctgtttagtgttgtggctttggcatagacttctcttggtaataatgccttgcaatgcaaaatttcaattatcaaattctattatgttctcaccttatggtaacagcttaccctgtggaagatgagattcttgagttgagtcattgccaatttttggcattagcttttgaattagtgaattttgacaaaaattaccgtgacactgattttgttgaagctcttaagtgtagtttttacaaaatttcagtggctcgttgtgattatgtcaaactcacggcgaatgtagttcttacagaatttcagtggctccctgcaggatcccaatggcgcgcctagctaactagctagccacgtgactcgcagaacgttgtgtggcgagacggaaagaaagtcacgcctccaaagagtgcagcatctcttctggctctcacggtcctctgtggatccatcgatatcgaattcctgcaggctcgaggtcattcatatgcttgagaagagagtcgggatagtccaaaataaaacaaaggtaagattacctggtcaaaagtgaaaacatcagttaaaaggtggtataaagtaaaatatcggtaataaaaggtggcccaaagtgaaatttactcttttctactattataaaaattgaggatgtttttgtcggtactttgatacgtcatttttgtatgaattggtttttaagtttattcgcttttggaaatgcatatctgtatttgagtcgggttttaagttcgtttgcttttgtaaatacagagggatttgtataagaaatatctttagaaaaacccatatgctaatttgacataatttttgagaaaaatatatattcaggcgaattctcacaatgaacaataataagattaaaatagctttcccccgttgcagcgcatgggtattttttctagtaaaaataaaagataaacttagactcaaaacatttacaaaaacaacccctaaagttcctaaagcccaaagtgctatccacgatccatagcaagcccagcccaacccaacccaacccaacccaccccagtccagccaactggacaatagtctccacacccccccactatcaccgtgagttgtccgcacgcaccgcacgtctcgcagccaaaaaaaaaaagaaagaaaaaaaagaaaaagaaaaaacagcaggtgggtccgggtcgtgggggccggaaacgcgaggaggatcgcgagccagcgacgaggagcttaggcctcatcgttgaagatgcctctgccgacagtggtcccaaagatggacccccacccacgaggagcatcgtggaaaaagaagacgttccaaccacgtcttcaaagcaagtggattgatgtgatatctccactgacgtaagggatgacgcacaatcccactatccttcgaggcctcatcgttgaagatgcctctgccgacagtggtcccaaagatggacccccacccacgaggagcatcgtggaaaaagaagacgttccaaccacgtcttcaaagcaagtggattgatgtgatatctccactgacgtaagggatgacgcacaatcccactatccttcgaagctccctccctccgcttccaaagaaacgccccccatcgccactatatacatacccccccctctcctcccatccccccaacccttctagaaccatcttccacacactcaagccacactattggagaacacacagggacaacacaccataagatccaagggaggcctccgccgccgccggtaaccaccccgcccctctcctctttctttctccgtttttttttccgtctcggtctcgatctttggccttggtagtttgggtgggcgagaggcggcttcgtgcgcgcccagatcggtgcgcgggaggggcgggatctcgcggctggggctctcgccggcgtggatccggcccggatctcgcggggaatggggctctcggatgtagatctgcgatccgccgttgttgggggagatgatggggggtttaaaatttccgccgtgctaaacaagatcaggaagaggggaaaagggcactatggtttatatttttatatatttctgctgcttcgtcaggcttagatgtgctagatctttctttcttctttttgtgggtagaatttgaatccctcagcattgttcatcggtagtttttcttttcatgatttgtgacaaatgcagcctcgtgcggagcttttttgtaggtagaaggcggccgcatggcccagtctaagcacgggttgacgaaggagatgactatgaagtatcgcatggaaggctgcgttgacggccacaaattcgtcattaccggcgagggcatcggctacccctttaaggtaagtttctgcttctacctttgatatatatataataattatcattaattagtagtaatataatatttcaaatatttttttcaaaataaaagaatgtagtatatagcaattgcttttctgtagtttataagtgtgtatattttaatttataacttttctaatatatgaccaaaatttgttgatgtgcagggcaagcaagcgataaacctgtgcgtggtggagggtggccctctgcccttcgccgaggatatactctcagccgccttcatgtacgggaatcgggtgttcacggagtacccgcaagacatcgtggactacttcaagaactcctgccccgccggatacacatgggaccgttccttcctcttcgaggacggagccgtttgcatctgcaacgcggacatcaccgtgtccgtcgaggagaactgcatgtaccacgagtcaaagttctatggagtgaacttcccggccgatggtcccgtgatgaagaaaatgacggacaactgggagccgtcgtgcgagaaaatcattcccgtcccaaaacagggaatcctcaagggcgacgtgtcgatgtacctacttctcaaggacggtggacggctacggtgccagttcgacactgtttacaaggcgaagtcggtgccgaggaagatgccggactggcactttatccagcacaagctgacaagggaggacagaagcgacgctaagaaccagaaatggcacctcaccgagcacgccatcgccagtggctctgcgctgcccgggtgaccctgcaatgtgaccctagacttgtccatcttctggattggccaacttaattaatgtatgaaataaaaggatgcacacatagtgacatgctaatcactataatgtgggcatcaaagttgtgtgttatgtgtaattactaattatctgaataagagaaagagatcatccatatttcttatcctaaatgaatgtcacgtgtctttataattctttgatgaaccagatgcattttattaaccaattccatatacatataaatattaatcatatataattaatatcaattgggttagcaaaacaaatctagtctaggtgtgttttgctaattattgggggatagtgcaaaaagaaatctacgttctcaataattcagatagaaaacttaataaagtgagataatttacatagattgcttttatcctttgatatatgtgaaaccatgcatgatataaggaaaatagatagagaaataattttttacatcgttgaatatgtaaacaatttaattcaagaagctaggaatataaatattgaggagtttatgattattattattattttgatgttcaatgaagttttttttaatttcatatgaagtatacaaaaattcttcatagatttttgtttctatgccgtagttatctttaatatatttgtggttgaagaaatttattgctagaaacgaatggattgtcaatttttttttaaagcaaatatatatgaaattatactgtatattattttagtcatgattaaaatgtggccttaattgaatcatctttctcattcattttttcaaaagcatatcaggatgattgatatttatctattttaaaaattaatttaagggttcaaattaaatttaacttaaaagtgtcctaaccgtagttaaaggtttactttaaaaaaatactatgaaaaatctaatcttctatgaatcgagggcccggccgtgacggccacgagcgaactcctgcaggcgataaaaatgttttaaacgatatatattataaaaaaaaacgtttcaaaaataaatacaaaaatgtttttaaatatatataatttaactcattaaagaaaataaaaatgcaagtgcggtgacaagacaagctaaaagttgcaaaagaaatggcagggctataaggctcacctactcctggatttaccaaattttggttcgtccctatactcgaaaaataaaacaaaataaatttcagtatcttcgtttttgtatgctttgactgtgaggcgaggccaactttcttcttctgtctgagatgaattttgtttgcctcctgtgaaggatgtatcattcaaagtgaatgttttgcaactgccagtagtcccacatcgaccaaatattcttattacagtgtgtttatatagcacctggagaaggaatgggttgtttcaaagattaaataatttctactaagtgtagattgccgttaatttgagagtccaagtaatttctactaagtgtagatttttttttgcggccgcacaacaaacgcgccggcga

SEQ ID NO: 116 - DNA, 18472 bp, synthetic construct
  misc_feature 1..18472: note = pWISE3095 Full Plasmid Sequence
  source 1..18472: mol_type = other DNA
agcttactagtcaacaattggccaatctttgttctaaattgctaataaacgaccatttccgtcaattctccttggttgcaacagtctacccgtcaaatgtttactaatttataagtgtgaagtttgaattatgaaagacgaaatcgtattaaaaattcacaagaataaacaactccatagattttcaaaaaaacagtcacgagaaaaaaaccacagtccgtttgtctgctcttctagtttttattatttttctattaatagttttttgttatttcgagaataaaatttgaacgatgtccgaaccacaaaagccgagccgataaatcctaagccgagcctaactttagccgtaaccatcagtcacggctcccgggctaattcatttgaaccgaatcataatcaacggtttagatcaaactcaaaacaatctaacggcaacatagacgcgtcggtgagctaaaaagagtgtgaaagccaggtcaccatagcattgtctctcccagattttttatttgggaaataatagaagaaatagaaaaaaataaaagagtgagaaaaatcgtagagctatatattcgcacatgtactcgtttcgctttccttagtgttagctgctgccgctgttgtttctcctccatttctctatctttctctctcgctgcttctcgaatcttctgtatcatcttcttcttcttcaaggtgagtctctagatccgttcgcttgattttgctgctcgttagtcgttattgttgattctctatgccgatttcgctagatctgtttagcatgcgttgtggttttatgagaaaatctttgttttgggggttgcttgttatgtgattcgatccgtgcttgttggatcgatctgagctaattcttaaggtttatgtgttagatctatggagtttgaggattcttctcgcttctgtcgatctctcgctgttatttttgtttttttcagtgaagtgaagttgtttagttcgaaatgacttcgtgtatgctcgattgatctggttttaatcttcgatctgttaggtgttgatgtttacaagtgaattctagtgttttctcgttgagatctgtgaagtttgaacctagttttctcaataatcaacatatgaagcgatgtttgagtttcaataaacgctgctaatcttcgaaactaagttgtgatctgattcgtgtttacttcatgagcttatccaattcatttcggtttcattttactttttttttagtgaaccatggcgcaagttagcagaatctgcaatggtgtgcagaacccatctcttatctccaatctctcgaaatccagtcaacgcaaatctcccttatcggtttctctgaagacgcagcagcatccacgagcttatccgatttcgtcgtcgtggggattgaagaagagtgggatgacgttaattggctctgagcttcgtcctcttaaggtcatgtcttctgtttccacggcgtgcatgggggaagcggtgatcgccgaagtatcgactcaactatcagaggtagttggcgtcatcgagcgccatctcgaaccgacgttgctggccgtacatttgtacggctccgcagtggatggcggcctgaagccacacagtgatattgatttgctggttacggtgaccgtaaggcttgatgaaacaacgcggcgagctttgatcaacgaccttttggaaacttcggcttcccctggagagagcgagattctccgcgctgtagaagtcaccattgttgtgcacgacgacatcattccgtggcgttatccagctaagcgcgaactgcaatttggagaatggcagcgcaatgacattcttgcaggtatcttcgagccagccacgatcgacattgatctggctatcttgctgacaaaagcaagagaacatagcgttgccttggtaggtccagcggcggaggaactctttgatccggttcctgaacaggatctatttgaggcgctaaatgaaaccttaacgctatggaactcgccgcccgactgggctggcgatgagcgaaatgtagtgcttacgttgtcccgcatttggtacagcgcagtaaccggcaaaatcgcgccgaaggatgtcgctgccgactgggcaatggagcgcctgccggcccagtatcagcccgtcatacttgaagctagacaggcttatcttggacaagaagaagatcgcttggcctcgcgcgcagatcagttggaagaatttgtccactacgtgaaaggcgagatcaccaaggtagtcggcaaataaggatcaattcccgatcgttcaaacatttggcaataaagtttcttaagattgaatcctgttgccggtcttgcgatgattatcatataatttctgttgaattacgttaagcatgtaataattaacatgtaatgcatgacgttatttatgagatgggtttttatgattagagtcccgcaattatacatttaatacgcgatagaaaacaaaatatagcgcgcaaactaggataaattatcgcgcgcggtgtcatctatgttactagatcggtacctacgcgtagctagcccgtgaagtttctcatctaagcccccatttggacgtgaatgtagacacgtcgaaataaagatttccgaattagaataatttgtttattgctttcgcctataaatacgacggatcgtaatttgtcgttttatcaaaatgtactttcattttataataacgctgcggacatctacatttttgaattgaaaaaaaattggtaattactctttctttttctccatattgaccatcatactcattgctgatccatgtagatttcccggacatgaagccatttacaattgaatatatcctgccgccgctgccgctttgcacccggtggagcttgcatgttggtttctacgcagaactgagccggttaggcagataatttccattgagaactgagccatgtgcaccttccccccaacacggtgagcgacggggcaacggagtgatccacatgggacttttcctagcttggctgccatttttggggtgaggccgttcgcggccgaggggcgcagcccctggggggatgggaggcccgcgttagcgggccgggagggttcgagaagggggggcaccccccttcggcgtgcgcggtcacgcgcacagggcgcagccctggttaaaaacaaggtttataaatattggtttaaaagcaggttaaaagacaggttagcggtggccgaaaaacgggcggaaacccttgcaaatgctggattttctgcctgtggacagcccctcaaatgtcaataggtgcgcccctcatctgtcagcactctgcccctcaagtgtcaaggatcgcgcccctcatctgtcagtagtcgcgcccctcaagtgtcaataccgcagggcacttatccccaggcttgtccacatcatctgtgggaaactcgcgtaaaatcaggcgttttcgccgatttgcgaggctggccagctccacgtcgccggccgaaatcgagcctgcccctcatctgtcaacgccgcgccgggtgagtcggcccctcaagtgtcaacgtccgcccctcatctgtcagtgagggccaagttttccgcgaggtatccacaacgccggcggccggccgcggtgtctcgcacacggcttcgacggcgtttctggcgcgtttgcagggccatagacggccgccagcccagcggcgagggcaaccagcccggtgagcgtcggaaagggtcgatcgaccgatgcccttgagagccttcaacccagtcagctccttccggtgggcgcggggcatgactatcgtcgccgcacttatgactgtcttctttatcatgcaactcgtaggacaggtgccggcagcgctctgggtcattttcggcgaggaccgctttcgctggagcgcgacgatgatcggcctgtcgcttgcggtattcggaatcttgcacgccctcgctcaagccttcgtcactggtcccgccaccaaacgtttcggcgagaagcaggccattatcgccggcatggcggccgacgcgctgggctacgtcttgctggcgttcgcgacgcgaggctggatggccttccccattatgattcttctcgcttccggcggcatcgggatgcccgcgttgcaggccatgctgtccaggcaggtagatgacgaccatcagggacagcttcaaggatcgctcgcggctcttaccagcctaacttcgatcattggaccgctgatcgtcacggcgatttatgccgcctcggcgagcacatggaacgggttggcatggattgtaggcgccgccctataccttgtctgcctccccgcgttgcgtcgcggtgcatggagccgggccacctcgacctgaatggaagccggcggcacctcgctaacggattcaccactccaagaattggagccaatcaattcttgcggagaactgtgaatgcgcaaaccaacccttggcagaacatatccatcgcgtccgccatctccagcagccgcacgcggcgcatctcgggcagcgttgggtcctggccacgggtgcgcatgatcgtgctcctgtcgttgaggacccggctaggctggcggggttgccttactggttagcagaatgaatcaccgatacgcgagcgaacgtgaagcgactgctgctgcaaaacgtctgcgacctgagcaacaacatgaatggtcttcggtttccgtgtttcgtaaagtctggaaacgcggaagtcagcgccctgcaccattatgttccggatctgcatcgcaggatgctgctggctaccctgtggaacacctacatctgtattaacgaagcgctggcattgaccctgagtgatttttctctggtcccgccgcatccataccgccagttgtttaccctcacaacgttccagtaaccgggcatgttcatcatcagtaacccgtatcgtgagcatcctctctcgtttcatcggtatcattacccccatgaacagaaatcccccttacacggaggcatcagtgaccaaacaggaaaaaaccgcccttaacatggcccgctttatcagaagccagacattaacgcttctggagaaactcaacgagctggacgcggatgaacaggcagacatctgtgaatcgcttcacgaccacgctgatgagctttaccgcagctgcctcgcgcgtttcggtgatgacggtgaaaacctctgacacatgcagctcccggagacggtcacagcttgtctgtaagcggatgccgggagcagacaagcccgtcagggcgcgtcagcgggtgttggcgggtgtcggggcgcagccatgacccagtcacgtagcgatagcggagtgtatactggcttaactatgcggcatcagagcagattgtactgagagtgcaccatatgcggtgtgaaataccgcacagatgcgtaaggagaaaataccgcatcaggcgctcttccgcttcctcgctcactgactcgctgcgctcggtcgttcggctgcggcgagcggtatcagctcactcaaaggcggtaatacggttatccacagaatcaggggataacgcaggaaagaacatgtgagcaaaaggccagcaaaaggccaggaaccgtaaaaaggccgcgttgctggcgtttttccataggctccgcccccctgacgagcatcacaaaaatcgacgctcaagtcagaggtggcgaaacccgacaggactataaagataccaggcgtttccccctggaagctccctcgtgcgctctcctgttccgaccctgccgcttaccggatacctgtccgcctttctcccttcgggaagcgtggcgctttctcatagctcacgctgtaggtatctcagttcggtgtaggtcgttcgctccaagctgggctgtgtgcacgaaccccccgttcagcccgaccgctgcgccttatccggtaactatcgtcttgagtccaacccggtaagacacgacttatcgccactggcagcagccactggtaacaggattagcagagcgaggtatgtaggcggtgctacagagttcttgaagtggtggcctaactacggctacactagaaggacagtatttggtatctgcgctctgctgaagccagttaccttcggaaaaagagttggtagctcttgatccggcaaacaaaccaccgctggtagcggtggtttttttgtttgcaagcagcagattacgcgcagaaaaaaaggatctcaagaagatcctttgatcttttctacggggtctgacgctcagtggaacgaaaactcacgttaagggattttggtcatgagattatcaaaaaggatcttcacctagatccttttaaattaaaaatgaagttttaaatcaatctaaagtatatatgagtaaacttggtctgacagttaccaatgcttaatcagtgaggcacctatctcagcgatctgtctatttcgttcatccatagttgcctgactccccgtcgtgtagataactacgatacgggagggcttaccatctggccccagtgctgcaatgataccgcgagacccacgctcaccggctccagatttatcagcaataaaccagccagccggaagggccgagcgcagaagtggtcctgcaactttatccgcctccatccagtctattaattgttgccgggaagctagagtaagtagttcgccagttaatagtttgcgcaacgttgttgccattgctgcaggtcgggagcacaggatgacgcctaacaattcattcaagccgacaccgcttcgcggcgcggcttaattcaggagttaaacatcatgagggaagcggtgatcgccgaagtatcgactcaactatcagaggtagttggcgtcatcgagcgccatctcgaaccgacgttgctggccgtacatttgtacggctccgcagtggatggcggcctgaagccacacagtgatattgatttgctggttacggtgaccgtaaggcttgatgaaacaacgcggcgagctttgatcaacgaccttttggaaacttcggcttcccctggagagagcgagattctccgcgctgtagaagtcaccattgttgtgcacgacgacatcattccgtggcgttatccagctaagcgcgaactgcaatttggagaatggcagcgcaatgacattcttgcaggtatcttcgagccagccacgatcgacattgatctggctatcttgctgacaaaagcaagagaacatagcgttgccttggtaggtccagcggcggaggaactctttgatccggttcctgaacaggatctatttgaggcgctaaatgaaaccttaacgctatggaactcgccgcccgactgggctggcgatgagcgaaatgtagtgcttacgttgtcccgcatttggtacagcgcagtaaccggcaaaatcgcgccgaaggatgtcgctgccgactgggcaatggagcgcctgccggcccagtatcagcccgtcatacttgaagctaggcaggcttatcttggacaagaagatcgcttggcctcgcgcgcagatcagttggaagaatttgttcactacgtgaaaggcgagatcaccaaggtagtcggcaaataatgtctaacaattcgttcaagccgacgccgcttcgcggcgcggcttaactcaagcgttagatgctgcaggcatcgtggtgtcacgctcgtcgtttggtatggcttcattcagctccggttcccaacgatcaaggcgagttacatgatcccccatgttgtgcaaaaaagcggttagctccttcggtcctccgatcgaggatttttcggcgctgcgctacgtccgcgaccgcgttgagggatcaagccacagcagcccactcgaccttctagccgacccagacgagccaagggatctttttggaatgctgctccgtcgtcaggctttccgacgtttgggtggttgaacagaagtcattatcgcacggaatgccaagcactcccgaggggaaccctgtggttggcatgcacatacaaatggacgaacggataaaccttttcacgcccttttaaatatccgattattctaataaacgctcttttctcttaggtttacccgccaatatatcctgtcaaacactgatagtttaaactgaaggcgggaaacgacaatctggcgcgccactgttaataatttttaaacgtcagcgcactaaaaaaacgaaaagacggacacgtgaaaataaaaaacacacactagtttatgacgcaatactattttacttatgatttgggtacattagacaaaaccgtgaaagagatgtatcagctatgaaacctgtatacttcaatacagagacttactcatatcggatacgtacgcacgaagtatcatattaattattttaatttttaataaatattttatcggatacttatgtgatactctacatatacacaaggatatttctaagatactttatagatacgtatcctagaaaaacatgaagagtaaaaaagtgagacaatgttgtaaaaattcattataaatgtatatgattcaattttagatatgcatcagtataattgattctcgatgaaacacttaaaattatatttcttgtggaagaacgtagcgagagaggtgattcagttagacaacattaaataaaattaatgttaagttcttttaatgatgtttctctcaatatcacatcatatgaaaatgtaatatgatttataagaaaatttttaaaaaatttattttaataatcacatgtactattttttaaaaattgtatcttttataataatacaataataaagagtaatcagtgttaatttttcttcaaatataagttttattataaatcattgttaacgtatcataagtcattaccgtatcgtatcttaatttttttttaaaaaccgctaattcacgtacccgtattgtattgtacccgcacctgtatcacaatcgatcttagttagaagaattgtctcgaggcggtgcaagacagcatataatagacgtggactctcttataccaaacgttgtcgtatcacaaagggttaggtaacaagtcacagtttgtccacgtgtcacgttttaattggaagaggtgccgttggcgtaatataacagccaatcgatttttgctataaaagcaaatcaggtaaactaaacttcttcattcttttcttccccatcgctacaaaaccggttcctttggaaaagagattcattcaaacctagcacccaattccgtttcaaggtataatctactttctattcttcgattattttattattattagctactatcgtttaatcgatcttttcttttgatccgtcaaatttaaattcaattagggttttgttcttttctttcatctgattgaaatccttctgaattgaaccgtttacttgattttactgtttattgtatgatttaatcctttgtttttcaaagacagtctttagattgtgattaggggttcatataaatttttagatttggatttttgtattgtatgattcaaaaaatacgtcctttaattagattagtacatggatattttttacccgatttattgattgtcagggagaatttgatgagcaagtttttttgatgtctgttgtaaattgaattgattataattgctgatctgctgcttccagttttcataacccatattcttttaaccttgttgtacacacaatgaaaaattggtgattgattcatttgtttttctttgttttggattatacagggtatggcgtccaagctggagaagtttacaaactgttacagcctctccaaaaccctcaggtttaaagcgatcccggtgggcaagacccaggagaacatcgacaacaagaggctcctggtggaagacgagaagcgcgccgaagactacaagggcgtgaagaagctgctcgataggtactacctcagctttattaacgacgtgctgcacagcatcaaactcaagaatctcaacaactacatctccctcttccgcaaaaagacccgcaccgagaaggagaacaaggagctggagaacctggagatcaacctccgcaaggaaatcgccaaagcgttcaagggcaatgaagggtacaagagcctcttcaagaaagacatcatcgaaactatcctcccagagtttctcgatgacaaggacgagatcgcgctggtgaactcctttaacgggttcacaaccgcgtttaccggcttctttgataacagggaaaatatgttctccgaggaggccaagtccaccagcatcgccttcaggtgtatcaacgagaacctcacccgctacatttccaatatggacattttcgagaaggtggatgcgatcttcgataagcacgaggtgcaggagatcaaagagaagattctcaattccgattatgacgtcgaggatttcttcgaaggggagttctttaattttgtgctcacacaagagggcattgacgtgtacaacgcgattatcgggggcttcgtcacagagtccggggagaagattaaggggctgaatgagtacatcaatctgtacaatcagaagaccaagcagaaactgccgaaattcaagccgctctacaagcaagtcctgtccgatagggaaagcctctccttctacggcgagggctataccagcgacgaggaggtgctggaagtcttccgcaacacactgaataagaatagcgagattttctcctccatcaagaagctcgagaagctctttaagaactttgacgagtacagctccgccgggattttcgtgaagaacgggccggcgatcagcaccatctccaaggacatctttggcgagtggaacgtcatcagggacaagtggaacgccgagtacgacgacatccacctgaagaagaaggcggtggtgaccgagaagtatgaggacgatcgcaggaagtccttcaaaaaaatcggctccttcagcctcgaacagctccaggagtatgccgatgcggatctgtccgtcgtcgagaagctgaaggaaatcatcattcagaaggtcgacgagatctataaagtgtacgggtccagcgagaagctgttcgacgccgactttgtgctcgagaagtccctcaaaaagaatgacgccgtggtggccattatgaaagacctgctcgactccgtgaagtccttcgaaaattacattaaagcgttctttggggaggggaaggaaactaacagggatgagtccttctatggcgactttgtcctcgcgtacgacatcctgctgaaggtcgaccacatttacgacgcgatccgcaactacgtgacacagaagccgtactccaaagacaagttcaagctgtacttccagaacccgcaatttatggggggctgggacaaggataaagagacagactaccgcgcgacaattctccgctatggctccaaatactatctggccatcatggacaagaagtacgcgaagtgcctgcagaagatcgacaaagacgacgtcaatggcaactatgaaaagatcaactacaagctgctgccgggtccgaacaagatgctcccgaaggtgttcttcagcaagaagtggatggcctactacaatccaagcgaggatattcagaaaatctataaaaacgggaccttcaagaagggggacatgtttaacctcaacgactgccacaagctcattgatttcttcaaggatagcatttcccgctacccgaaatggtccaatgcgtacgattttaacttctccgagacagaaaagtacaaagacatcgcgggcttttacagggaggtggaggagcaagggtataaagtttcttttgaatccgcgagcaagaaggaagtcgacaagctcgtcgaggagggcaagctctacatgttccaaatttataacaaggacttttccgacaagagccatgggaccccaaacctccacaccatgtacttcaaactgctctttgacgagaacaaccacgggcaaatcaggctgagcggcggcgccgaattattcatgcgcagggcctccctcaagaaggaagagctggtcgtccatccagccaattccccgatcgcgaacaagaacccggacaatccgaaaaagaccaccaccctgtcctacgacgtctacaaggacaaacgcttcagcgaagaccagtacgaattacacatcccaattgcgattaataagtgcccaaagaatatcttcaaaattaatacagaggtcagggtgctgctcaaacacgacgacaatccgtatgtcatcggcattgacaggggcgagcgcaatctgctctatatcgtggtcgtggatgggaagggcaatattgtggagcagtactccctgaacgagattatcaacaacttcaatgggattaggattaagaccgactatcacagcctgctcgacaagaaagaaaaagagaggtttgaggcccgccaaaactggacctccattgagaatatcaaagaattaaaggccggctatatttcccaagtcgtccacaagatctgcgagctggtggagaaatatgacgccgtgattgcgctcgaagacttaaattctgggttcaagaactcccgcgtgaaggtggaaaaacaggtgtatcagaaattcgagaaaatgctgatcgacaaactcaattatatggtggataagaagtccaacccgtgtgccacagggggcgcgctgaagggctatcagatcaccaacaagttcgagagcttcaagagcatgagcacccagaacgggtttattttctacatcccggcgtggctcacctccaagattgacccgagcaccggcttcgtgaacctcctgaagacaaagtatacctccattgccgacagcaagaagtttatctcctccttcgaccgcattatgtatgtgccggaggaggacctcttcgagttcgccctcgactacaaaaacttcagccgcacagatgcggattacatcaagaagtggaagctgtactcctacgggaacaggatccgcatcttcaggaatccaaaaaaaaataacgtctttgactgggaggaagtgtgcctgacatccgcctacaaggaactgttcaataaatacggcatcaattaccagcagggcgacattcgcgccctcctctgtgagcagtccgacaaagcgttttactccagcttcatggccctcatgtccctgatgctccaaatgaggaatagcatcacagggcgcaccgacgtcgacttcctcatcagcccggtgaagaactccgacgggatcttttacgactcccgcaactatgaggcgcaagagaatgcgatcctcccgaagaacgccgatgcgaacggggcctataatatcgccaggaaagtgctctgggccatcgggcagttcaaaaaggcggaggatgagaagctcgacaaggtgaaaattgccatttccaacaaggagtggctggagtacgcgcagacctccgtgaagcacggctcctccgagacaccaggcacctccgagagcgcgacgcccgagggcggctccggcggctccggcagcgcagagtatgttcgtgccctttttgattttaacggcaatgatgaagaggatttgcccttcaagaaaggtgacatcctccgaataagggacaaaccagaagaacaatggtggaatgctgaagattctgaagggaagagaggaatgattcctgtcccttatgtggagaagtactgaaagggctctctgtcatgatttcatactttcattattgagctctgtaattacaattatgaccatgagaacatctcttattgtgtggccttttaattgctgatgttagtactgaaccaaagcttatcgtgatgatgtaaaagcaataagtacttgtttgtagcttctttgtgtctccctttgggcttaatacatctgtttagtgttgtggctttggcatagacttctcttggtaataatgccttgcaatgcaaaatttcaattatcaaattctattatgttctcaccttatggtaacagcttaccctgtggaagatgagattcttgagttgagtcattgccaatttttggcattagcttttgaattagtgaattttgacaaaaattaccgtgacactgattttgttgaagctcttaagtgtagtttttacaaaatttcagtggctcgttgtgattatgtcaaactcacggcgaatgtagttcttacagaatttcagtggctccctgcaggatcccaatggcgcgcctagctaactagctagccacgtgactcgcagaacgttgtgtggcgagacggaaagaaagtcacgcctccaaagagtgcagcatctcttctggctctcacggtcctctgtggatccatcgatatcgaattcctgcaggctcgaggtcattcatatgcttgagaagagagtcgggatagtccaaaataaaacaaaggtaagattacctggtcaaaagtgaaaacatcagttaaaaggtggtataaagtaaaatatcggtaataaaaggtggcccaaagtgaaatttactcttttctactattataaaaattgaggatgtttttgtcggtactttgatacgtcatttttgtatgaattggtttttaagtttattcgcttttggaaatgcatatctgtatttgagtcgggttttaagttcgtttgcttttgtaaatacagagggatttgtataagaaatatctttagaaaaacccatatgctaatttgacataatttttgagaaaaatatatattcaggcgaattctcacaatgaacaataataagattaaaatagctttcccccgttgcagcgcatgggtattttttctagtaaaaataaaagataaacttagactcaaaacatttacaaaaacaacccctaaagttcctaaagcccaaagtgctatccacgatccatagcaagcccagcccaacccaacccaacccaacccaccccagtccagccaactggacaatagtctccacacccccccactatcaccgtgagttgtccgcacgcaccgcacgtctcgcagccaaaaaaaaaaagaaagaaaaaaaagaaaaagaaaaaacagcaggtgggtccgggtcgtgggggccggaaacgcgaggaggatcgcgagccagcgacgaggagcttaggcctcatcgttgaagatgcctctgccgacagtggtcccaaagatggacccccacccacgaggagcatcgtggaaaaagaagacgttccaaccacgtcttcaaagcaagtggattgatgtgatatctccactgacgtaagggatgacgcacaatcccactatccttcgaggcctcatcgttgaagatgcctctgccgacagtggtcccaaagatggacccccacccacgaggagcatcgtggaaaaagaagacgttccaaccacgtcttcaaagcaagtggattgatgtgatatctccactgacgtaagggatgacgcacaatcccactatccttcgaagctccctccctccgcttccaaagaaacgccccccatcgccactatatacatacccccccctctcctcccatccccccaacccttctagaaccatcttccacacactcaagccacactattggagaacacacagggacaacacaccataagatccaagggaggcctccgccgccgccggtaaccaccccgcccctctcctctttctttctccgtttttttttccgtctcggtctcgatctttggccttggtagtttgggtgggcgagaggcggcttcgtgcgcgcccagatcggtgcgcgggaggggcgggatctcgcggctggggctctcgccggcgtggatccggcccggatctcgcggggaatggggctctcggatgtagatctgcgatccgccgttgttgggggagatgatggggggtttaaaatttccgccgtgctaaacaagatcaggaagaggggaaaagggcactatggtttatatttttatatatttctgctgcttcgtcaggcttagatgtgctagatctttctttcttctttttgtgggtagaatttgaatccctcagcattgttcatcggtagtttttcttttcatgatttgtgacaaatgcagcctcgtgcggagcttttttgtaggtagaaggcggccgcatggcccagtctaagcacgggttgacgaaggagatgactatgaagtatcgcatggaaggctgcgttgacggccacaaattcgtcattaccggcgagggcatcggctacccctttaaggtaagtttctgcttctacctttgatatatatataataattatcattaattagtagtaatataatatttcaaatatttttttcaaaataaaagaatgtagtatatagcaattgcttttctgtagtttataagtgtgtatattttaatttataacttttctaatatatgaccaaaatttgttgatgtgcagggcaagcaagcgataaacctgtgcgtggtggagggtggccctctgcccttcgccgaggatatactctcagccgccttcatgtacgggaatcgggtgttcacggagtacccgcaagacatcgtggactacttcaagaactcctgccccgccggatacacatgggaccgttccttcctcttcgaggacggagccgtttgcatctgcaacgcggacatcaccgtgtccgtcgaggagaactgcatgtaccacgagtcaaagttctatggagtgaacttcccggccgatggtcccgtgatgaagaaaatgacggacaactgggagccgtcgtgcgagaaaatcattcccgtcccaaaacagggaatcctcaagggcgacgtgtcgatgtacctacttctcaaggacggtggacggctacggtgccagttcgacactgtttacaaggcgaagtcggtgccgaggaagatgccggactggcactttatccagcacaagctgacaagggaggacagaagcgacgctaagaaccagaaatggcacctcaccgagcacgccatcgccagtggctctgcgctgcccgggtgaccctgcaatgtgaccctagacttgtccatcttctggattggccaacttaattaatgtatgaaataaaaggatgcacacatagtgacatgctaatcactataatgtgggcatcaaagttgtgtgttatgtgtaattactaattatctgaataagagaaagagatcatccatatttcttatcctaaatgaatgtcacgtgtctttataattctttgatgaaccagatgcattttattaaccaattccatatacatataaatattaatcatatataattaatatcaattgggttagcaaaacaaatctagtctaggtgtgttttgctaattattgggggatagtgcaaaaagaaatctacgttctcaataattcagatagaaaacttaataaagtgagataatttacatagattgcttttatcctttgatatatgtgaaaccatgcatgatataaggaaaatagatagagaaataattttttacatcgttgaatatgtaaacaatttaattcaagaagctaggaatataaatattgaggagtttatgattattattattattttgatgttcaatgaagttttttttaatttcatatgaagtatacaaaaattcttcatagatttttgtttctatgccgtagttatctttaatatatttgtggttgaagaaatttattgctagaaacgaatggattgtcaatttttttttaaagcaaatatatatgaaattatactgtatattattttagtcatgattaaaatgtggccttaattgaatcatctttctcattcattttttcaaaagcatatcaggatgattgatatttatctattttaaaaattaatttaagggttcaaattaaatttaacttaaaagtgtcctaaccgtagttaaaggtttactttaaaaaaatactatgaaaaatctaatcttctatgaatcgagggcccggccgtgacggccacgagcgaactcctgcaggcgataaaaatgttttaaacgatatatattataaaaaaaaacgtttcaaaaataaatacaaaaatgtttttaaatatatataatttaactcattaaagaaaataaaaatgcaagtgcggtgacaagacaagctaaaagttgcaaaagaaatggcagggctataaggctcacctactcctggatttaccaaattttggttcgtccctatactcgaaaaataaaacaaaataaatttcagtatcttcgtttttgtatgctttgactgtgaggcgaggccaactttcttcttctgtctgagatgaattttgtttgcctcctgtgaaggatgtatcattcaaagtgaatgttttgcaactgccagtagtcccacatcgaccaaatattcttattacagtgtgtttatatagcacctggagaaggaatgggttgtttcaaagattaaataatttctactaagtgtagattgccgttaatttgagagtccaagtaatttctactaagtgtagatttttttttgcggccgcacaacaaacgcgccggcga

SEQ ID NO: 117 - DNA, 19066 bp, synthetic construct
  misc_feature 1..19066: note = pWISE3097 Full Plasmid Sequence
  source 1..19066: mol_type = other DNA
agcttactagtcaacaattggccaatctttgttctaaattgctaataaacgaccatttccgtcaattctccttggttgcaacagtctacccgtcaaatgtttactaatttataagtgtgaagtttgaattatgaaagacgaaatcgtattaaaaattcacaagaataaacaactccatagattttcaaaaaaacagtcacgagaaaaaaaccacagtccgtttgtctgctcttctagtttttattatttttctattaatagttttttgttatttcgagaataaaatttgaacgatgtccgaaccacaaaagccgagccgataaatcctaagccgagcctaactttagccgtaaccatcagtcacggctcccgggctaattcatttgaaccgaatcataatcaacggtttagatcaaactcaaaacaatctaacggcaacatagacgcgtcggtgagctaaaaagagtgtgaaagccaggtcaccatagcattgtctctcccagattttttatttgggaaataatagaagaaatagaaaaaaataaaagagtgagaaaaatcgtagagctatatattcgcacatgtactcgtttcgctttccttagtgttagctgctgccgctgttgtttctcctccatttctctatctttctctctcgctgcttctcgaatcttctgtatcatcttcttcttcttcaaggtgagtctctagatccgttcgcttgattttgctgctcgttagtcgttattgttgattctctatgccgatttcgctagatctgtttagcatgcgttgtggttttatgagaaaatctttgttttgggggttgcttgttatgtgattcgatccgtgcttgttggatcgatctgagctaattcttaaggtttatgtgttagatctatggagtttgaggattcttctcgcttctgtcgatctctcgctgttatttttgtttttttcagtgaagtgaagttgtttagttcgaaatgacttcgtgtatgctcgattgatctggttttaatcttcgatctgttaggtgttgatgtttacaagtgaattctagtgttttctcgttgagatctgtgaagtttgaacctagttttctcaataatcaacatatgaagcgatgtttgagtttcaataaacgctgctaatcttcgaaactaagttgtgatctgattcgtgtttacttcatgagcttatccaattcatttcggtttcattttactttttttttagtgaaccatggcgcaagttagcagaatctgcaatggtgtgcagaacccatctcttatctccaatctctcgaaatccagtcaacgcaaatctcccttatcggtttctctgaagacgcagcagcatccacgagcttatccgatttcgtcgtcgtggggattgaagaagagtgggatgacgttaattggctctgagcttcgtcctcttaaggtcatgtcttctgtttccacggcgtgcatgggggaagcggtgatcgccgaagtatcgactcaactatcagaggtagttggcgtcatcgagcgccatctcgaaccgacgttgctggccgtacatttgtacggctccgcagtggatggcggcctgaagccacacagtgatattgatttgctggttacggtgaccgtaaggcttgatgaaacaacgcggcgagctttgatcaacgaccttttggaaacttcggcttcccctggagagagcgagattctccgcgctgtagaagtcaccattgttgtgcacgacgacatcattccgtggcgttatccagctaagcgcgaactgcaatttggagaatggcagcgcaatgacattcttgcaggtatcttcgagccagccacgatcgacattgatctggctatcttgctgacaaaagcaagagaacatagcgttgccttggtaggtccagcggcggaggaactctttgatccggttcctgaacaggatctatttgaggcgctaaatgaaaccttaacgctatggaactcgccgcccgactgggctggcgatgagcgaaatgtagtgcttacgttgtcccgcatttggtacagcgcagtaaccggcaaaatcgcgccgaaggatgtcgctgccgactgggcaatggagcgcctgccggcccagtatcagcccgtcatacttgaagctagacaggcttatcttggacaagaagaagatcgcttggcctcgcgcgcagatcagttggaagaatttgtccactacgtgaaaggcgagatcaccaaggtagtcggcaaataaggatcaattcccgatcgttcaaacatttggcaataaagtttcttaagattgaatcctgttgccggtcttgcgatgattatcatataatttctgttgaattacgttaagcatgtaataattaacatgtaatgcatgacgttatttatgagatgggtttttatgattagagtcccgcaattatacatttaatacgcgatagaaaacaaaatatagcgcgcaaactaggataaattatcgcgcgcggtgtcatctatgttactagatcggtacctacgcgtagctagcccgtgaagtttctcatctaagcccccatttggacgtgaatgtagacacgtcgaaataaagatttccgaattagaataatttgtttattgctttcgcctataaatacgacggatcgtaatttgtcgttttatcaaaatgtactttcattttataataacgctgcggacatctacatttttgaattgaaaaaaaattggtaattactctttctttttctccatattgaccatcatactcattgctgatccatgtagatttcccggacatgaagccatttacaattgaatatatcctgccgccgctgccgctttgcacccggtggagcttgcatgttggtttctacgcagaactgagccggttaggcagataatttccattgagaactgagccatgtgcaccttccccccaacacggtgagcgacggggcaacggagtgatccacatgggacttttcctagcttggctgccatttttggggtgaggccgttcgcggccgaggggcgcagcccctggggggatgggaggcccgcgttagcgggccgggagggttcgagaagggggggcaccccccttcggcgtgcgcggtcacgcgcacagggcgcagccctggttaaaaacaaggtttataaatattggtttaaaagcaggttaaaagacaggttagcggtggccgaaaaacgggcggaaacccttgcaaatgctggattttctgcctgtggacagcccctcaaatgtcaataggtgcgcccctcatctgtcagcactctgcccctcaagtgtcaaggatcgcgcccctcatctgtcagtagtcgcgcccctcaagtgtcaataccgcagggcacttatccccaggcttgtccacatcatctgtgggaaactcgcgtaaaatcaggcgttttcgccgatttgcgaggctggccagctccacgtcgccggccgaaatcgagcctgcccctcatctgtcaacgccgcgccgggtgagtcggcccctcaagtgtcaacgtccgcccctcatctgtcagtgagggccaagttttccgcgaggtatccacaacgccggcggccggccgcggtgtctcgcacacggcttcgacggcgtttctggcgcgtttgcagggccatagacggccgccagcccagcggcgagggcaaccagcccggtgagcgtcggaaagggtcgatcgaccgatgcccttgagagccttcaacccagtcagctccttccggtgggcgcggggcatgactatcgtcgccgcacttatgactgtcttctttatcatgcaactcgtaggacaggtgccggcagcgctctgggtcattttcggcgaggaccgctttcgctggagcgcgacgatgatcggcctgtcgcttgcggtattcggaatcttgcacgccctcgctcaagccttcgtcactggtcccgccaccaaacgtttcggcgagaagcaggccattatcgccggcatggcggccgacgcgctgggctacgtcttgctggcgttcgcgacgcgaggctggatggccttccccattatgattcttctcgcttccggcggcatcgggatgcccgcgttgcaggccatgctgtccaggcaggtagatgacgaccatcagggacagcttcaaggatcgctcgcggctcttaccagcctaacttcgatcattggaccgctgatcgtcacggcgatttatgccgcctcggcgagcacatggaacgggttggcatggattgtaggcgccgccctataccttgtctgcctccccgcgttgcgtcgcggtgcatggagccgggccacctcgacctgaatggaagccggcggcacctcgctaacggattcaccactccaagaattggagccaatcaattcttgcggagaactgtgaatgcgcaaaccaacccttggcagaacatatccatcgcgtccgccatctccagcagccgcacgcggcgcatctcgggcagcgttgggtcctggccacgggtgcgcatgatcgtgctcctgtcgttgaggacccggctaggctggcggggttgccttactggttagcagaatgaatcaccgatacgcgagcgaacgtgaagcgactgctgctgcaaaacgtctgcgacctgagcaacaacatgaatggtcttcggtttccgtgtttcgtaaagtctggaaacgcggaagtcagcgccctgcaccattatgttccggatctgcatcgcaggatgctgctggctaccctgtggaacacctacatctgtattaacgaagcgctggcattgaccctgagtgatttttctctggtcccgccgcatccataccgccagttgtttaccctcacaacgttccagtaaccgggcatgttcatcatcagtaacccgtatcgtgagcatcctctctcgtttcatcggtatcattacccccatgaacagaaatcccccttacacggaggcatcagtgaccaaacaggaaaaaaccgcccttaacatggcccgctttatcagaagccagacattaacgcttctggagaaactcaacgagctggacgcggatgaacaggcagacatctgtgaatcgcttcacgaccacgctgatgagctttaccgcagctgcctcgcgcgtttcggtgatgacggtgaaaacctctgacacatgcagctcccggagacggtcacagcttgtctgtaagcggatgccgggagcagacaagcccgtcagggcgcgtcagcgggtgttggcgggtgtcggggcgcagccatgacccagtcacgtagcgatagcggagtgtatactggcttaactatgcggcatcagagcagattgtactgagagtgcaccatatgcggtgtgaaataccgcacagatgcgtaaggagaaaataccgcatcaggcgctcttccgcttcctcgctcactgactcgctgcgctcggtcgttcggctgcggcgagcggtatcagctcactcaaaggcggtaatacggttatccacagaatcaggggataacgcaggaaagaacatgtgagcaaaaggccagcaaaaggccaggaaccgtaaaaaggccgcgttgctggcgtttttccataggctccgcccccctgacgagcatcacaaaaatcgacgctcaagtcagaggtggcgaaacccgacaggactataaagataccaggcgtttccccctggaagctccctcgtgcgctctcctgttccgaccctgccgcttaccggatacctgtccgcctttctcccttcgggaagcgtggcgctttctcatagctcacgctgtaggtatctcagttcggtgtaggtcgttcgctccaagctgggctgtgtgcacgaaccccccgttcagcccgaccgctgcgccttatccggtaactatcgtcttgagtccaacccggtaagacacgacttatcgccactggcagcagccactggtaacaggattagcagagcgaggtatgtaggcggtgctacagagttcttgaagtggtggcctaactacggctacactagaaggacagtatttggtatctgcgctctgctgaagccagttaccttcggaaaaagagttggtagctcttgatccggcaaacaaaccaccgctggtagcggtggtttttttgtttgcaagcagcagattacgcgcagaaaaaaaggatctcaagaagatcctttgatcttttctacggggtctgacgctcagtggaacgaaaactcacgttaagggattttggtcatgagattatcaaaaaggatcttcacctagatccttttaaattaaaaatgaagttttaaatcaatctaaagtatatatgagtaaacttggtctgacagttaccaatgcttaatcagtgaggcacctatctcagcgatctgtctatttcgttcatccatagttgcctgactccccgtcgtgtagataactacgatacgggagggcttaccatctggccccagtgctgcaatgataccgcgagacccacgctcaccggctccagatttatcagcaataaaccagccagccggaagggccgagcgcagaagtggtcctgcaactttatccgcctccatccagtctattaattgttgccgggaagctagagtaagtagttcgccagttaatagtttgcgcaacgttgttgccattgctgcaggtcgggagcacaggatgacgcctaacaattcattcaagccgacaccgcttcgcggcgcggcttaattcaggagttaaacatcatgagggaagcggtgatcgccgaagtatcgactcaactatcagaggtagttggcgtcatcgagcgccatctcgaaccgacgttgctggccgtacatttgtacggctccgcagtggatggcggcctgaagccacacagtgatattgatttgctggttacggtgaccgtaaggcttgatgaaacaacgcggcgagctttgatcaacgaccttttggaaacttcggcttcccctggagagagcgagattctccgcgctgtagaagtcaccattgttgtgcacgacgacatcattccgtggcgttatccagctaagcgcgaactgcaatttggagaatggcagcgcaatgacattcttgcaggtatcttcgagccagccacgatcgacattgatctggctatcttgctgacaaaagcaagagaacatagcgttgccttggtaggtccagcggcggaggaactctttgatccggttcctgaacaggatctatttgaggcgctaaatgaaaccttaacgctatggaactcgccgcccgactgggctggcgatgagcgaaatgtagtgcttacgttgtcccgcatttggtacagcgcagtaaccggcaaaatcgcgccgaaggatgtcgctgccgactgggcaatggagcgcctgccggcccagtatcagcccgtcatacttgaagctaggcaggcttatcttggacaagaagatcgcttggcctcgcgcgcagatcagttggaagaatttgttcactacgtgaaaggcgagatcaccaaggtagtcggcaaataatgtctaacaattcgttcaagccgacgccgcttcgcggcgcggcttaactcaagcgttagatgctgcaggcatcgtggtgtcacgctcgtcgtttggtatggcttcattcagctccggttcccaacgatcaaggcgagttacatgatcccccatgttgtgcaaaaaagcggttagctccttcggtcctccgatcgaggatttttcggcgctgcgctacgtccgcgaccgcgttgagggatcaagccacagcagcccactcgaccttctagccgacccagacgagccaagggatctttttggaatgctgctccgtcgtcaggctttccgacgtttgggtggttgaacagaagtcattatcgcacggaatgccaagcactcccgaggggaaccctgtggttggcatgcacatacaaatggacgaacggataaaccttttcacgcccttttaaatatccgattattctaataaacgctcttttctcttaggtttacccgccaatatatcctgtcaaacactgatagtttaaactgaaggcgggaaacgacaatctggcgcgccactgttaataatttttaaacgtcagcgcactaaaaaaacgaaaagacggacacgtgaaaataaaaaacacacactagtttatgacgcaatactattttacttatgatttgggtacattagacaaaaccgtgaaagagatgtatcagctatgaaacctgtatacttcaatacagagacttactcatatcggatacgtacgcacgaagtatcatattaattattttaatttttaataaatattttatcggatacttatgtgatactctacatatacacaaggatatttctaagatactttatagatacgtatcctagaaaaacatgaagagtaaaaaagtgagacaatgttgtaaaaattcattataaatgtatatgattcaattttagatatgcatcagtataattgattctcgatgaaacacttaaaattatatttcttgtggaagaacgtagcgagagaggtgattcagttagacaacattaaataaaattaatgttaagttcttttaatgatgtttctctcaatatcacatcatatgaaaatgtaatatgatttataagaaaatttttaaaaaatttattttaataatcacatgtactattttttaaaaattgtatcttttataataatacaataataaagagtaatcagtgttaatttttcttcaaatataagttttattataaatcattgttaacgtatcataagtcattaccgtatcgtatcttaatttttttttaaaaaccgctaattcacgtacccgtattgtattgtacccgcacctgtatcacaatcgatcttagttagaagaattgtctcgaggcggtgcaagacagcatataatagacgtggactctcttataccaaacgttgtcgtatcacaaagggttaggtaacaagtcacagtttgtccacgtgtcacgttttaattggaagaggtgccgttggcgtaatataacagccaatcgatttttgctataaaagcaaatcaggtaaactaaacttcttcattcttttcttccccatcgctacaaaaccggttcctttggaaaagagattcattcaaacctagcacccaattccgtttcaaggtataatctactttctattcttcgattattttattattattagctactatcgtttaatcgatcttttcttttgatccgtcaaatttaaattcaattagggttttgttcttttctttcatctgattgaaatccttctgaattgaaccgtttacttgattttactgtttattgtatgatttaatcctttgtttttcaaagacagtctttagattgtgattaggggttcatataaatttttagatttggatttttgtattgtatgattcaaaaaatacgtcctttaattagattagtacatggatattttttacccgatttattgattgtcagggagaatttgatgagcaagtttttttgatgtctgttgtaaattgaattgattataattgctgatctgctgcttccagttttcataacccatattcttttaaccttgttgtacacacaatgaaaaattggtgattgattcatttgtttttctttgttttggattatacagggtatggcgtccaagctggagaagtttacaaactgttacagcctctccaaaaccctcaggtttaaagcgatcccggtgggcaagacccaggagaacatcgacaacaagaggctcctggtggaagacgagaagcgcgccgaagactacaagggcgtgaagaagctgctcgataggtactacctcagctttattaacgacgtgctgcacagcatcaaactcaagaatctcaacaactacatctccctcttccgcaaaaagacccgcaccgagaaggagaacaaggagctggagaacctggagatcaacctccgcaaggaaatcgccaaagcgttcaagggcaatgaagggtacaagagcctcttcaagaaagacatcatcgaaactatcctcccagagtttctcgatgacaaggacgagatcgcgctggtgaactcctttaacgggttcacaaccgcgtttaccggcttctttgataacagggaaaatatgttctccgaggaggccaagtccaccagcatcgccttcaggtgtatcaacgagaacctcacccgctacatttccaatatggacattttcgagaaggtggatgcgatcttcgataagcacgaggtgcaggagatcaaagagaagattctcaattccgattatgacgtcgaggatttcttcgaaggggagttctttaattttgtgctcacacaagagggcattgacgtgtacaacgcgattatcgggggcttcgtcacagagtccggggagaagattaaggggctgaatgagtacatcaatctgtacaatcagaagaccaagcagaaactgccgaaattcaagccgctctacaagcaagtcctgtccgatagggaaagcctctccttctacggcgagggctataccagcgacgaggaggtgctggaagtcttccgcaacacactgaataagaatagcgagattttctcctccatcaagaagctcgagaagctctttaagaactttgacgagtacagctccgccgggattttcgtgaagaacgggccggcgatcagcaccatctccaaggacatctttggcgagtggaacgtcatcagggacaagtggaacgccgagtacgacgacatccacctgaagaagaaggcggtggtgaccgagaagtatgaggacgatcgcaggaagtccttcaaaaaaatcggctccttcagcctcgaacagctccaggagtatgccgatgcggatctgtccgtcgtcgagaagctgaaggaaatcatcattcagaaggtcgacgagatctataaagtgtacgggtccagcgagaagctgttcgacgccgactttgtgctcgagaagtccctcaaaaagaatgacgccgtggtggccattatgaaagacctgctcgactccgtgaagtccttcgaaaattacattaaagcgttctttggggaggggaaggaaactaacagggatgagtccttctatggcgactttgtcctcgcgtacgacatcctgctgaaggtcgaccacatttacgacgcgatccgcaactacgtgacacagaagccgtactccaaagacaagttcaagctgtacttccagaacccgcaatttatggggggctgggacaaggataaagagacagactaccgcgcgacaattctccgctatggctccaaatactatctggccatcatggacaagaagtacgcgaagtgcctgcagaagatcgacaaagacgacgtcaatggcaactatgaaaagatcaactacaagctgctgccgggtccgaacaagatgctcccgaaggtgttcttcagcaagaagtggatggcctactacaatccaagcgaggatattcagaaaatctataaaaacgggaccttcaagaagggggacatgtttaacctcaacgactgccacaagctcattgatttcttcaaggatagcatttcccgctacccgaaatggtccaatgcgtacgattttaacttctccgagacagaaaagtacaaagacatcgcgggcttttacagggaggtggaggagcaagggtataaagtttcttttgaatccgcgagcaagaaggaagtcgacaagctcgtcgaggagggcaagctctacatgttccaaatttataacaaggacttttccgacaagagccatgggaccccaaacctccacaccatgtacttcaaactgctctttgacgagaacaaccacgggcaaatcaggctgagcggcggcgccgaattattcatgcgcagggcctccctcaagaaggaagagctggtcgtccatccagccaattccccgatcgcgaacaagaacccggacaatccgaaaaagaccaccaccctgtcctacgacgtctacaaggacaaacgcttcagcgaagaccagtacgaattacacatcccaattgcgattaataagtgcccaaagaatatcttcaaaattaatacagaggtcagggtgctgctcaaacacgacgacaatccgtatgtcatcggcattgacaggggcgagcgcaatctgctctatatcgtggtcgtggatgggaagggcaatattgtggagcagtactccctgaacgagattatcaacaacttcaatgggattaggattaagaccgactatcacagcctgctcgacaagaaagaaaaagagaggtttgaggcccgccaaaactggacctccattgagaatatcaaagaattaaaggccggctatatttcccaagtcgtccacaagatctgcgagctggtggagaaatatgacgccgtgattgcgctcgaagacttaaattctgggttcaagaactcccgcgtgaaggtggaaaaacaggtgtatcagaaattcgagaaaatgctgatcgacaaactcaattatatggtggataagaagtccaacccgtgtgccacagggggcgcgctgaagggctatcagatcaccaacaagttcgagagcttcaagagcatgagcacccagaacgggtttattttctacatcccggcgtggctcacctccaagattgacccgagcaccggcttcgtgaacctcctgaagacaaagtatacctccattgccgacagcaagaagtttatctcctccttcgaccgcattatgtatgtgccggaggaggacctcttcgagttcgccctcgactacaaaaacttcagccgcacagatgcggattacatcaagaagtggaagctgtactcctacgggaacaggatccgcatcttcaggaatccaaaaaaaaataacgtctttgactgggaggaagtgtgcctgacatccgcctacaaggaactgttcaataaatacggcatcaattaccagcagggcgacattcgcgccctcctctgtgagcagtccgacaaagcgttttactccagcttcatggccctcatgtccctgatgctccaaatgaggaatagcatcacagggcgcaccgacgtcgacttcctcatcagcccggtgaagaactccgacgggatcttttacgactcccgcaactatgaggcgcaagagaatgcgatcctcccgaagaacgccgatgcgaacggggcctataatatcgccaggaaagtgctctgggccatcgggcagttcaaaaaggcggaggatgagaagctcgacaaggtgaaaattgccatttccaacaaggagtggctggagtacgcgcagacctccgtgaagcacggctcctccgagacaccaggcacctccgagagcgcgacgcccgagggcggctccggcggctccggcagcggtccagacatcgttatgactcaatccccctcaagcctttcagcctccgtgggcgacagagttaccattacctgccgctcaagcactggagcagtgaccacttctaactacgctagctgggtgcaggagaagccaggaaagctgttcaaggggctgattggaggcacaaacaatagagcccctggcgtgccatccaggttttctggaagcctgattggcgataaggcaacactgaccatctctagcctgcagcccgaggacttcgctacctacttttgcgccctgtggtatagcaatcactgggtgttcggtcaggggactaaggtggaactgaagagaggtgggggaggctccggtgggggaggctcaggtgggggaggctcctcaggtgggggatctgaggtgaagctgctggaaagcggcggtgggctggtgcagcccggaggctccctgaagctgtcatgtgccgtgtctggattttcactgaccgattacggcgtgaactgggtgagacaggcccctggaaggggactggagtggattggagtgatttggggagatgggatcacagactacaattccgcactgaaggatagattcattatctcaaaggacaacggaaagaacaccgtgtatctgcagatgtctaaggtgaggagcgatgacactgccctgtactattgcgtgacagggctgtttgactattgggggcaaggcactctggttaccgtgagcagctatccatacgatgttcccgactacgcttgaaagggctctctgtcatgatttcatactttcattattgagctctgtaattacaattatgaccatgagaacatctcttattgtgtggccttttaattgctgatgttagtactgaaccaaagcttatcgtgatgatgtaaaagcaataagtacttgtttgtagcttctttgtgtctccctttgggcttaatacatctgtttagtgttgtggctttggcatagacttctcttggtaataatgccttgcaatgcaaaatttcaattatcaaattctattatgttctcaccttatggtaacagcttaccctgtggaagatgagattcttgagttgagtcattgccaatttttggcattagcttttgaattagtgaattttgacaaaaattaccgtgacactgattttgttgaagctcttaagtgtagtttttacaaaatttcagtggctcgttgtgattatgtcaaactcacggcgaatgtagttcttacagaatttcagtggctccctgcaggatcccaatggcgcgcctagctaactagctagccacgtgactcgcagaacgttgtgtggcgagacggaaagaaagtcacgcctccaaagagtgcagcatctcttctggctctcacggtcctctgtggatccatcgatatcgaattcctgcaggctcgaggtcattcatatgcttgagaagagagtcgggatagtccaaaataaaacaaaggtaagattacctggtcaaaagtgaaaacatcagttaaaaggtggtataaagtaaaatatcggtaataaaaggtggcccaaagtgaaatttactcttttctactattataaaaattgaggatgtttttgtcggtactttgatacgtcatttttgtatgaattggtttttaagtttattcgcttttggaaatgcatatctgtatttgagtcgggttttaagttcgtttgcttttgtaaatacagagggatttgtataagaaatatctttagaaaaacccatatgctaatttgacataatttttgagaaaaatatatattcaggcgaattctcacaatgaacaataataagattaaaatagctttcccccgttgcagcgcatgggtattttttctagtaaaaataaaagataaacttagactcaaaacatttacaaaaacaacccctaaagttcctaaagcccaaagtgctatccacgatccatagcaagcccagcccaacccaacccaacccaacccaccccagtccagccaactggacaatagtctccacacccccccactatcaccgtgagttgtccgcacgcaccgcacgtctcgcagccaaaaaaaaaaagaaagaaaaaaaagaaaaagaaaaaacagcaggtgggtccgggtcgtgggggccggaaacgcgaggaggatcgcgagccagcgacgaggagcttaggcctcatcgttgaagatgcctctgccgacagtggtcccaaagatggacccccacccacgaggagcatcgtggaaaaagaagacgttccaaccacgtcttcaaagcaagtggattgatgtgatatctccactgacgtaagggatgacgcacaatcccactatccttcgaggcctcatcgttgaagatgcctctgccgacagtggtcccaaagatggacccccacccacgaggagcatcgtggaaaaagaagacgttccaaccacgtcttcaaagcaagtggattgatgtgatatctccactgacgtaagggatgacgcacaatcccactatccttcgaagctccctccctccgcttccaaagaaacgccccccatcgccactatatacatacccccccctctcctcccatccccccaacccttctagaaccatcttccacacactcaagccacactattggagaacacacagggacaacacaccataagatccaagggaggcctccgccgccgccggtaaccaccccgcccctctcctctttctttctccgtttttttttccgtctcggtctcgatctttggccttggtagtttgggtgggcgagaggcggcttcgtgcgcgcccagatcggtgcgcgggaggggcgggatctcgcggctggggctctcgccggcgtggatccggcccggatctcgcggggaatggggctctcggatgtagatctgcgatccgccgttgttgggggagatgatggggggtttaaaatttccgccgtgctaaacaagatcaggaagaggggaaaagggcactatggtttatatttttatatatttctgctgcttcgtcaggcttagatgtgctagatctttctttcttctttttgtgggtagaatttgaatccctcagcattgttcatcggtagtttttcttttcatgatttgtgacaaatgcagcctcgtgcggagcttttttgtaggtagaaggcggccgcatggcccagtctaagcacgggttgacgaaggagatgactatgaagtatcgcatggaaggctgcgttgacggccacaaattcgtcattaccggcgagggcatcggctacccctttaaggtaagtttctgcttctacctttgatatatatataataattatcattaattagtagtaatataatatttcaaatatttttttcaaaataaaagaatgtagtatatagcaattgcttttctgtagtttataagtgtgtatattttaatttataacttttctaatatatgaccaaaatttgttgatgtgcagggcaagcaagcgataaacctgtgcgtggtggagggtggccctctgcccttcgccgaggatatactctcagccgccttcatgtacgggaatcgggtgttcacggagtacccgcaagacatcgtggactacttcaagaactcctgccccgccggatacacatgggaccgttccttcctcttcgaggacggagccgtttgcatctgcaacgcggacatcaccgtgtccgtcgaggagaactgcatgtaccacgagtcaaagttctatggagtgaacttcccggccgatggtcccgtgatgaagaaaatgacggacaactgggagccgtcgtgcgagaaaatcattcccgtcccaaaacagggaatcctcaagggcgacgtgtcgatgtacctacttctcaaggacggtggacggctacggtgccagttcgacactgtttacaaggcgaagtcggtgccgaggaagatgccggactggcactttatccagcacaagctgacaagggaggacagaagcgacgctaagaaccagaaatggcacctcaccgagcacgccatcgccagtggctctgcgctgcccgggtgaccctgcaatgtgaccctagacttgtccatcttctggattggccaacttaattaatgtatgaaataaaaggatgcacacatagtgacatgctaatcactataatgtgggcatcaaagttgtgtgttatgtgtaattactaattatctgaataagagaaagagatcatccatatttcttatcctaaatgaatgtcacgtgtctttataattctttgatgaaccagatgcattttattaaccaattccatatacatataaatattaatcatatataattaatatcaattgggttagcaaaacaaatctagtctaggtgtgttttgctaattattgggggatagtgcaaaaagaaatctacgttctcaataattcagatagaaaacttaataaagtgagataatttacatagattgcttttatcctttgatatatgtgaaaccatgcatgatataaggaaaatagatagagaaataattttttacatcgttgaatatgtaaacaatttaattcaagaagctaggaatataaatattgaggagtttatgattattattattattttgatgttcaatgaagttttttttaatttcatatgaagtatacaaaaattcttcatagatttttgtttctatgccgtagttatctttaatatatttgtggttgaagaaatttattgctagaaacgaatggattgtcaatttttttttaaagcaaatatatatgaaattatactgtatattattttagtcatgattaaaatgtggccttaattgaatcatctttctcattcattttttcaaaagcatatcaggatgattgatatttatctattttaaaaattaatttaagggttcaaattaaatttaacttaaaagtgtcctaaccgtagttaaaggtttactttaaaaaaatactatgaaaaatctaatcttctatgaatcgagggcccggccgtgacggccacgagcgaactcctgcaggcgataaaaatgttttaaacgatatatattataaaaaaaaacgtttcaaaaataaatacaaaaatgtttttaaatatatataatttaactcattaaagaaaataaaaatgcaagtgcggtgacaagacaagctaaaagttgcaaaagaaatggcagggctataaggctcacctactcctggatttaccaaattttggttcgtccctatactcgaaaaataaaacaaaataaatttcagtatcttcgtttttgtatgctttgactgtgaggcgaggccaactttcttcttctgtctgagatgaattttgtttgcctcctgtgaaggatgtatcattcaaagtgaatgttttgcaactgccagtagtcccacatcgaccaaatattcttattacagtgtgtttatatagcacctggagaaggaatgggttgtttcaaagattaaataatttctactaagtgtagattgccgttaatttgagagtccaagtaatttctactaagtgtagatttttttttgcggccgcacaacaaacgcgccggcga

SEQ ID NO: 118 - DNA, 16312 bp, synthetic construct
  misc_feature 1..16312: note = pWISE768 Full Plasmid Sequence
  source 1..16312: mol_type = other DNA
cccataatagctgtttgccaatcgttcttcttggcgcgccactgttaataatttttaaacgtcagcgcactaaaaaaacgaaaagacggacacgtgaaaataaaaaacacacactagtttatgacgcaatactattttacttatgatttgggtacattagacaaaaccgtgaaagagatgtatcagctatgaaacctgtatacttcaatacagagacttactcatatcggatacgtacgcacgaagtatcatattaattattttaatttttaataaatattttatcggatacttatgtgatactctacatatacacaaggatatttctaagatactttatagatacgtatcctagaaaaacatgaagagtaaaaaagtgagacaatgttgtaaaaattcattataaatgtatatgattcaattttagatatgcatcagtataattgattctcgatgaaacacttaaaattatatttcttgtggaagaacgtagcgagagaggtgattcagttagacaacattaaataaaattaatgttaagttcttttaatgatgtttctctcaatatcacatcatatgaaaatgtaatatgatttataagaaaatttttaaaaaatttattttaataatcacatgtactattttttaaaaattgtatcttttataataatacaataataaagagtaatcagtgttaatttttcttcaaatataagttttattataaatcattgttaacgtatcataagtcattaccgtatcgtatcttaatttttttttaaaaaccgctaattcacgtacccgtattgtattgtacccgcacctgtatcacaatcgatcttagttagaagaattgtctcgaggcggtgcaagacagcatataatagacgtggactctcttataccaaacgttgtcgtatcacaaagggttaggtaacaagtcacagtttgtccacgtgtcacgttttaattggaagaggtgccgttggcgtaatataacagccaatcgatttttgctataaaagcaaatcaggtaaactaaacttcttcattcttttcttccccatcgctacaaaaccggttcctttggaaaagagattcattcaaacctagcacccaattccgtttcaaggtataatctactttctattcttcgattattttattattattagctactatcgtttaatcgatcttttcttttgatccgtcaaatttaaattcaattagggttttgttcttttctttcatctgattgaaatccttctgaattgaaccgtttacttgattttactgtttattgtatgatttaatcctttgtttttcaaagacagtctttagattgtgattaggggttcatataaatttttagatttggatttttgtattgtatgattcaaaaaatacgtcctttaattagattagtacatggatattttttacccgatttattgattgtcagggagaatttgatgagcaagtttttttgatgtctgttgtaaattgaattgattataattgctgatctgctgcttccagttttcataacccatattcttttaaccttgttgtacacacaatgaaaaattggtgattgattcatttgtttttctttgttttggattatacagggtggtaccaaaaaatggcgggatctaagaagagaagaattaaacaagattccaagctggagaagtttacaaactgttacagcctctccaaaaccctcaggtttaaagcgatcccggtgggcaagacccaggagaacatcgacaacaagaggctcctggtggaagacgagaagcgcgccgaagactacaagggcgtgaagaagctgctcgataggtactacctcagctttattaacgacgtgctgcacagcatcaaactcaagaatctcaacaactacatctccctcttccgcaaaaagacccgcaccgagaaggagaacaaggagctggagaacctggagatcaacctccgcaaggaaatcgccaaagcgttcaagggcaatgaagggtacaagagcctcttcaagaaagacatcatcgaaactatcctcccagagtttctcgatgacaaggacgagatcgcgctggtgaactcctttaacgggttcacaaccgcgtttaccggcttctttgataacagggaaaatatgttctccgaggaggccaagtccaccagcatcgccttcaggtgtatcaacgagaacctcacccgctacatttccaatatggacattttcgagaaggtggatgcgatcttcgataagcacgaggtgcaggagatcaaagagaagattctcaattccgattatgacgtcgaggatttcttcgaaggggagttctttaattttgtgctcacacaagagggcattgacgtgtacaacgcgattatcgggggcttcgtcacagagtccggggagaagattaaggggctgaatgagtacatcaatctgtacaatcagaagaccaagcagaaactgccgaaattcaagccgctctacaagcaagtcctgtccgatagggaaagcctctccttctacggcgagggctataccagcgacgaggaggtgctggaagtcttccgcaacacactgaataagaatagcgagattttctcctccatcaagaagctcgagaagctctttaagaactttgacgagtacagctccgccgggattttcgtgaagaacgggccggcgatcagcaccatctccaaggacatctttggcgagtggaacgtcatcagggacaagtggaacgccgagtacgacgacatccacctgaagaagaaggcggtggtgaccgagaagtatgaggacgatcgcaggaagtccttcaaaaaaatcggctccttcagcctcgaacagctccaggagtatgccgatgcggatctgtccgtcgtcgagaagctgaaggaaatcatcattcagaaggtcgacgagatctataaagtgtacgggtccagcgagaagctgttcgacgccgactttgtgctcgagaagtccctcaaaaagaatgacgccgtggtggccattatgaaagacctgctcgactccgtgaagtccttcgaaaattacattaaagcgttctttggggaggggaaggaaactaacagggatgagtccttctatggcgactttgtcctcgcgtacgacatcctgctgaaggtcgaccacatttacgacgcgatccgcaactacgtgacacagaagccgtactccaaagacaagttcaagctgtacttccagaacccgcaatttatggggggctgggacaaggataaagagacagactaccgcgcgacaattctccgctatggctccaaatactatctggccatcatggacaagaagtacgcgaagtgcctgcagaagatcgacaaagacgacgtcaatggcaactatgaaaagatcaactacaagctgctgccgggcccgaacaagatgctcccgaaggtgttcttcagcaagaagtggatggcctactacaatccaagcgaggatattcagaaaatctataaaaacgggaccttcaagaagggggacatgtttaacctcaacgactgccacaagctcattgatttcttcaaggatagcatttcccgctacccgaaatggtccaatgcgtacgattttaacttctccgagacagaaaagtacaaagacatcgcgggcttttacagggaggtggaggagcaagggtataaagtttcttttgaatccgcgagcaagaaggaagtcgacaagctcgtcgaggagggcaagctctacatgttccaaatttataacaaggacttttccgacaagagccatgggaccccaaacctccacaccatgtacttcaaactgctctttgacgagaacaaccacgggcaaatcaggctgagcggcggcgccgaattattcatgcgcagggcctccctcaagaaggaagagctggtcgtccatccagccaattccccgatcgcgaacaagaacccggacaatccgaaaaagaccaccaccctgtcctacgacgtctacaaggacaaacgcttcagcgaagaccagtacgaattacacatcccaattgcgattaataagtgcccaaagaatatcttcaaaattaatacagaggtcagggtgctgctcaaacacgacgacaatccgtatgtcatcggcattgacaggggcgagcgcaatctgctctatatcgtggtcgtggatgggaagggcaatattgtggagcagtactccctgaacgagattatcaacaacttcaatgggattaggattaagaccgactatcacagcctgctcgacaagaaagaaaaagagaggtttgaggcccgccaaaactggacctccattgagaatatcaaagaattaaaggccggctatatttcccaagtcgtccacaagatctgcgagctggtggagaaatatgacgccgtgattgcgctcgaagacttaaattctgggttcaagaactcccgcgtgaaggtggaaaaacaggtgtatcagaaattcgagaaaatgctgatcgacaaactcaattatatggtggataagaagtccaacccgtgtgccacagggggcgcgctgaagggctatcagatcaccaacaagttcgagagcttcaagagcatgagcacccagaacgggtttattttctacatcccggcgtggctcacctccaagattgacccgagcaccggcttcgtgaacctcctgaagacaaagtatacctccattgccgacagcaagaagtttatctcctccttcgaccgcattatgtatgtgccggaggaggacctcttcgagttcgccctcgactacaaaaacttcagccgcacagatgcggattacatcaagaagtggaagctgtactcctacgggaacaggatccgcatcttcaggaatccaaaaaaaaataacgtctttgactgggaggaagtgtgcctgacatccgcctacaaggaactgttcaataaatacggcatcaattaccagcagggcgacattcgcgccctcctctgtgagcagtccgacaaagcgttttactccagcttcatggccctcatgtccctgatgctccaaatgaggaatagcatcacagggcgcaccgacgtcgacttcctcatcagcccggtgaagaactccgacgggatcttttacgactcccgcaactatgaggcgcaagagaatgcgatcctcccgaagaacgccgatgcgaacggggcctataatatcgccaggaaagtgctctgggccatcgggcagttcaaaaaggcggaggatgagaagctcgacaaggtgaaaattgccatttccaacaaggagtggctggagtacgcgcagacctccgtgaagcacggatctaagaagagaagaattaaacaagattgacttaattaaagggctctctgtcatgatttcatactttcattattgagctctgtaattacaattatgaccatgagaacatctcttattgtgtggccttttaattgctgatgttagtactgaaccaaagcttatcgtgatgatgtaaaagcaataagtacttgtttgtagcttctttgtgtctccctttgggcttaatacatctgtttagtgttgtggctttggcatagacttctcttggtaataatgccttgcaatgcaaaatttcaattatcaaattctattatgttctcaccttatggtaacagcttaccctgtggaagatgagattcttgagttgagtcattgccaatttttggcattagcttttgaattagtgaattttgacaaaaattaccgtgacactgattttgttgaagctcttaagtgtagtttttacaaaatttcagtggctcgttgtgattatgtcaaactcacggcgaatgtagttcttacagaatttcagtggctcgggcccggccgtgacggccacgagcgaactcctgcaggcgataaaaatgttttaaacgatatatattataaaaaaaaacgtttcaaaaataaatacaaaaatgtttttaaatatatataatttaactcattaaagaaaataaaaatgcaagtgcggtgacaagacaagctaaaagttgcaaaagaaatggcagggctataaggctcacctactcctggatttaccaaattttggttcgtccctatactcgaaaaataaaacaaaataaatttcagtatcttcgtttttgtatgctttgactgtgaggcgaggccaactttcttcttctgtctgagatgaattttgtttgcctcctgtgaaggatgtatcattcaaagtgaatgttttgcaactgccagtagtcccacatcgaccaaatattcttattacagtgtgtttatatagcacctggagaaggaatgggttgtttcaaagattaaataatttctactaagtgtagattgccgttaatttgagagtccaagtaatttctactaagtgtagatttttttttgcggccgcacaacaaacgcgccggcgctctcttaaggtagcaaggatccctgaaagcgacgttggatgttaacatctacaaattgccttttcttatcgaccatgtacgtaagcgcttacgtttttggtggacccttgaggaaactggtagctgttgtgggcctgtggtctcaagatggatcattaatttccaccttcacctacgatggggggcatcgcaccggtgagtaatattgtacggctaagagcgaatttggcctgtagacctcaattgcgagctttctaatttcaaactattcgggcctaacttttggtgtgatgatgctgactggcaggatatataccgttgtaatttgagctcgtgtgaataagtcgctgtgtatgtttgtttgattgtttctgttggagtgcagcccatttcaccggacaagtcggctagattgatttagccctgatgaactgccgaggggaagccatcttgagcgcggaatgggaatggatttcgttgtacaacgagacgacagaacacccacgggaccgagcttcgaagctttaacgcttgagttaagccgcgccgcgaagcggcgtcggcttgaacgaattgttagacatcagaagaactcgtcaagaaggcgatagaaggcgatgcgctgcgaatcgggagcggcgataccgtaaagcacgaggaagcggtcagcccattcgccgccaagctcttcagcaatatcacgggtagccaacgctatgtcctgatagcggtccgccacacccagccggccacagtcgatgaatccagaaaagcggccattttccaccatgatattcggcaagcaggcatcgccatgggtcacgacgagatcctcgccgtcgggcatgcgcgccttgagcctggcgaacagttcggctggcgcgagcccctgatgctcttcgtccagatcatcctgatcgacaagaccggcttccatccgagtacgtgctcgctcgatgcgatgtttcgcttggtggtcgaatgggcaggtagccggatcaagcgtatgcagccgccgcattgcatcagccatgatggatactttctcggcaggagcaaggtgagatgacaggagatcctgccccggcacttcgcccaatagcagccagtcccttcccgcttcagtgacaacgtcgagcacagctgcgcaaggaacgcccgtcgtggccagccacgatagccgcgctgcctcgtcctgcagttcattcagggcaccggacaggtcggtcttgacaaaaagaaccgggcgcccctgcgctgacagccggaacacggcggcatcagagcagccgattgtctgttgtgcccagtcatagccgaatagcctctccacccaagcggccggagaacctgcgtgcaatccatcttgttcaatcatggctttgtttctccttcaatcattgactattgtcacgttattctgaatcgacgagaactcacatcaatctcaacaagcatctctgctcgcgaaattggtgttgtctcattaaaacgtgaccgtcaaagtctattcactaggacccaaatctctccaggtcccgcaagctagcttcgccgcccacgtttctctttcttctcatattcaattgtcaaaaaacagacctcatgaccaaaatcccttaacgtgagttttcgttccactgagcgtcagaccccgtagaaaagatcaaaggatcttcttgagatcctttttttctgcgcgtaatctgctgcttgcaaacaaaaaaaccaccgctaccagcggtggtttgtttgccggatcaagagctaccaactttttttccgaaggtaactggcttcagcagagcgcagataccaaatactgtccttctagtgtagccgtagttaggccaccacttcaagaactctgtagcaccgcctacatacctcgctctgctaatcctgttaccagtggctgctgccagtggcgataagtcgtgtcttaccgggttggactcaagacgatagttaccggataaggcgcagcggtcgggctgaacggggggttcgtgcacacagcccagcttggagcgaacgacctacaccgaactgagatacctacagcgtgagctatgagaaagcgccacgcttcccgaagggagaaaggcggacaggtatccggtaagcggcagggtcggaacaggagagcgcacgagggagcttccagggggaaacgcctggtatctttatagtcctgtcgggtttcgccacctctgacttgagcgtcgatttttgtgatgctcgtcaggggggcggagcctatggaaaaacgccagcaacgcggcctttttacggttcctggccttttgctggccttttgctcacatgttctttcctgcgttatcccctgattctgtggataaccgtattaccgcctttgagtgagctgataccgctcgccgcagccgaacgaccgagcgcagcgagtcagtgagcgaggaagcggaagagcgcctgatgcggtattttctccttacgcatctgtgcggtatttcacaccgcatatggtgcactctcagtacaatctgctctgatgccgcatagttaagccagtatacaggctctccttcacgatcaacgatcggcatggggccttcgtgcttgttgagtaatgttatcgctcccatcagagcacgcttggtactccgggaatcggatggtctgtcgatcatccaaaaaacgctcatgttttcaacctattaggtctgtggtcagctgaccacagaccatcctgctccatactcgctaattctagccaaaccgcaacgtcccctgcccgctagccttcaagagcgccattatcatcgggccaagtgaaaacttcccgagctcgctccgccgtgtcagatctcggagatagcccccgggcgaattgatgaagttcgctcgctccaaaatgcacgccatcgctgctgccgcattctccggtcccattgcctcacacgcgtcttggtaagccgacgggctgacccccagcatagaccgaaccaccaccgcagccgacatgaggtcacgccagctagcaaccgcaccgctcggcccataattgccaatggtcgggcatgctttcaggatcatcccgagggggaacgcttttatcggctcgctccttgcccggtctatttcactcggcttagcgccctgctccttttcagagcgaggttcaagttcattaacggattcgggttttgaattctgtatgtgctgctcgctctgggcagcattggtgctattattttctgaattgtctctaatttccaaccggttgattatctcttcctggagcatccacatctcttcgagaattgactctacatcagcaagcgtcggggcgcgtggaattctacccacaagttccacatagacttcctcgacagcttgccagtcgccctccgctccctcttccatagctgccgtaattagcttccgaacgtcccgtcggcaaatcgtcagactttctttggccatcctgaatgctgctcgatcggccatcacctgctgtgccatcatcgctagctcttcggaccgcgcgagaagcggagacaaatcgaagccaaacgcgcgctcgatctgaccagcgccatccttacgagcgtaacgctttccgttggcgctatccttccggacgatcaagcctgactccacgagcatggcgatgtgcctacgcaaagtcgcgccagccatcccatgcgcccgaagggcaagctgagcattcgacgggaagacgatcagctgtgcctcctgacgcaactccgtttccgggtgaaagctcaatagcgcatcaaggacggcaagactgttggactggattccaagtagttccatggccgcggacgcgtctctaaagaccttccacttgtccgctgtcttgccttgtttgatatcggccagcgccgtctggcgccgcacaagcgcaagcgtcattggccgccgcccgaatggcgtcgttacacttcctgtctgcatcatctttcacctttcagcaggcaaaggaaatcagctcaccaaaacggcgctaaaaactcttgacgaggattcgaggaaatgcgattctgttcgcgctagagagacagaagggcttccgcgacggcgacgttgagggggctcttttcttttgcggtttactctccccgtttccgttggttctcagcgtggtacgcttgatacagcgctggcacatgatcgagcacgaaggtcgcaaaatcgggcgtcgccttcctgtcaatcgtgatttccagtttggccttgctctgcgtcacctgtgcaattctggtgccgtctggggtggccatgacctcgggaagtccacgcgcaacccgactgggcttcagactagcgatcaccgccttgaatcgttctgccgatggcagcgcttgaacttcctccgacatagcatatttagccacgtcggccggtgaagaaactttctcaatcagctcggcaagttgttgccaactcggccgtccaacaccaggagcggcaccaatagcatcggtcagttcagaggggagggcgtcgacgagcagaagcatcttggacaaattgctcttgtcgatcgacatcgcggcgatgacaatctctcgagaaaactgcctgttcaggcgatgtgcgaagcgcgccttttcgatgaaggtaagatcttcgcgctcattgttttcctgaccctgtgctacgaccacttgctcgtccgtcagttcgcgaacgaccgctctgaccggaagtccgagttctgaaacggcgcgtagccggcggtggccgaaggcaacctgatatcggcccggctggctcggatgcggtcgcacaaggattgggacttgctgtccttgttcccggatcgaagtaaggagcccgtcaatgtcccctcgcatacgatcctgcacgaaagacggttctattgacgaggcatccaactctatcactgcctgaccttcagcgagacgccgctcgatctcttcggcacggctaagacgatcgttttgctctcgcagtgcgttaccaatgttcgctgtgagcttcgttgccggatcgcgctccttccttgttacgccgaggagcggcatggagcggttctttgccgtcctattgtcggcgggcgacgtctcaggggcgtcagttgagacgccaaggatgtgcttccggctcatgtgggcctaccccatgcttttttgatcagtgtttcgatctcgtcgttgacggcgttcatcgcctccaaggctcgatcataggtcgagcgcgtgaacaggccacgctccacttcgaatagagtctggtttgtcaggccagcgtccgaaaccgcggtggttttaagcatcggaaaattgaggacattttcgccaaaaatcgaccgcagataacctaccatttggttctgtggtccgtcgctcggttcgaaacgggttatcagatagcgcatccaattaaacttgaacttggcgccagcattctcgatttcacgcaaaaggttcgatgtcattgccagaaactggttcatcgacatcacatccagcatctgcggatggaccgtgacaagaatggacgtcgccgcagtcaatgcggatagcgtgagatacccaagctggggagggcagtcgatgaccacgacgtcatagttatccgcgatatcttcaattacttggctgatgcgaccataaaagagcgtgtcgccctctttgcggttcatcagcgcgcgtggcgtatcgtgttcaaactccatcagctcaaggttaccaggaatcaggtggaggtcgggaatgtaagtccctcggacgactcgttcgattgccacctgctcatcatcataccttatagcgccgtagagcgtttcgttcgggccaacgtccgtctccggttggctcccaaagagtgcagaaaggctcgcttgaggatcgagatcaatggccaagactcgatatccgcgcatagcgaggtactgcgccagatgcgcggcggtggtggtcttacccgacccacctttgaaattcatcacagagataacctgaagctgctcgccgcctcgacgatgtggcaggtagcgccggttcccgcggccgacctgatccatatacttccgaatcacatggatatcttcaattgagaacattcgcctgccacccgggctcatgctaacattcaactctggcatctcagacgcggtctgccgtaaatatgactcgccaacgccgagcagcttggacgcctccgatggcccgaatgttcgaatgcccttctcggaatgcggcgggaaaaccttaagatgatgtgcttgaagttggctcgagagggcatcggcatgacgctccatcaaggccgtcaaccctacaactacaggcgctgcttttaggacagacttcgccatctcaaacccattccttgccagtggcgatatttttcgcgaaactggaaaagttccgccgctggcaattagcgccgattctgctgtttgggcaagagcttttaggttaacagaaggttaacgccctcaggtcgaaaaactccacccaactgttatttgtatttatttccaatgccttagagagattgccatttgaatatgttcatgtattgttttagtgataatcctacaatcgtaacccaaaaagaggtcgccctctgcgcgccgtcgtccaatataggcgaagtcacccttgcgactcaggcggattctaccttgtacacgtgtcgagtggaaaagtcccatgtggatcactccgttgccccgtcgctcaccgtgttggggggaaggtgcacatggctcagttctcaatggaaattatctgcctaaccggctcagttctgcgtagaaaccaacatgcaagctccaccgggtgcaaagcggcagcggcggcaggatatattcaattgtaaatggcttcatgtccgggaaatctacatggatcagcaatgagtatgatggtcaatatggagaaaaagaaagagtaattaccaattttttttcaattcaaaaatgtagatgtccgcagcgttattataaaatgaaagtacattttgataaaacgacaaattacgatccgtcgtatttataggcgaaagcaataaacaaattattctaattcggaaatctttatttcgacgtgtctacattcacgtccaaatgggggcttagatgagaaacttcacgatcgatgcggccctaggcgtacgataacttcgtataatgtatgctatacgaagttatcactagtcaacaattggccaatctttgttctaaattgctaataaacgaccatttccgtcaattctccttggttgcaacagtctacccgtcaaatgtttactaatttataagtgtgaagtttgaattatgaaagacgaaatcgtattaaaaattcacaagaataaacaactccatagattttcaaaaaaacagtcacgagaaaaaaaccacagtccgtttgtctgctcttctagtttttattatttttctattaatagttttttgttatttcgagaataaaatttgaacgatgtccgaaccacaaaagccgagccgataaatcctaagccgagcctaactttagccgtaaccatcagtcacggctcccgggctaattcatttgaaccgaatcataatcaacggtttagatcaaactcaaaacaatctaacggcaacatagacgcgtcggtgagctaaaaagagtgtgaaagccaggtcaccatagcattgtctctcccagattttttatttgggaaataatagaagaaatagaaaaaaataaaagagtgagaaaaatcgtagagctatatattcgcacatgtactcgtttcgctttccttagtgttagctgctgccgctgttgtttctcctccatttctctatctttctctctcgctgcttctcgaatcttctgtatcatcttcttcttcttcaaggtgagtctctagatccgttcgcttgattttgctgctcgttagtcgttattgttgattctctatgccgatttcgctagatctgtttagcatgcgttgtggttttatgagaaaatctttgttttgggggttgcttgttatgtgattcgatccgtgcttgttggatcgatctgagctaattcttaaggtttatgtgttagatctatggagtttgaggattcttctcgcttctgtcgatctctcgctgttatttttgtttttttcagtgaagtgaagttgtttagttcgaaatgacttcgtgtatgctcgattgatctggttttaatcttcgatctgttaggtgttgatgtttacaagtgaattctagtgttttctcgttgagatctgtgaagtttgaacctagttttctcaataatcaacatatgaagcgatgtttgagtttcaataaacgctgctaatcttcgaaactaagttgtgatctgattcgtgtttacttcatgagcttatccaattcatttcggtttcattttactttttttttagtgaaccatggcgcaagttagcagaatctgcaatggtgtgcagaacccatctcttatctccaatctctcgaaatccagtcaacgcaaatctcccttatcggtttctctgaagacgcagcagcatccacgagcttatccgatttcgtcgtcgtggggattgaagaagagtgggatgacgttaattggctctgagcttcgtcctcttaaggtcatgtcttctgtttccacggcgtgcatgggggaagcggtgatcgccgaagtatcgactcaactatcagaggtagttggcgtcatcgagcgccatctcgaaccgacgttgctggccgtacatttgtacggctccgcagtggatggcggcctgaagccacacagtgatattgatttgctggttacggtgaccgtaaggcttgatgaaacaacgcggcgagctttgatcaacgaccttttggaaacttcggcttcccctggagagagcgagattctccgcgctgtagaagtcaccattgttgtgcacgacgacatcattccgtggcgttatccagctaagcgcgaactgcaatttggagaatggcagcgcaatgacattcttgcaggtatcttcgagccagccacgatcgacattgatctggctatcttgctgacaaaagcaagagaacatagcgttgccttggtaggtccagcggcggaggaactctttgatccggttcctgaacaggatctatttgaggcgctaaatgaaaccttaacgctatggaactcgccgcccgactgggctggcgatgagcgaaatgtagtgcttacgttgtcccgcatttggtacagcgcagtaaccggcaaaatcgcgccgaaggatgtcgctgccgactgggcaatggagcgcctgccggcccagtatcagcccgtcatacttgaagctagacaggcttatcttggacaagaagaagatcgcttggcctcgcgcgcagatcagttggaagaatttgtccactacgtgaaaggcgagatcaccaaggtagtcggcaaataaggatcaattcccgatcgttcaaacatttggcaataaagtttcttaagattgaatcctgttgccggtcttgcgatgattatcatataatttctgttgaattacgttaagcatgtaataattaacatgtaatgcatgacgttatttatgagatgggtttttatgattagagtcccgcaattatacatttaatacgcgatagaaaacaaaatatagcgcgcaaactaggataaattatcgcgcgcggtgtcatctatgttactagatcggggatccaacgttataacttcgtataatgtatgctatacgaagttattaactataacggtcctaaggtagcgacttaggctgagcccgggcaggcctacccataata

SEQ ID NO: 119 - DNA, 6973 bp, synthetic construct
  misc_feature 1..6973: note = pWISE3030 Full Plasmid Sequence
  source 1..6973: mol_type = other DNA
tcgcgcgtttcggtgatgacggtgaaaacctctgacacatgcagctcccggagactgtcacagcttgtctgtaagcggatgccgggagcagacaagcccgtcagggcgcgtcagcgggtgttggcgggtgtcggggctggcttaactatgcggcatcagagcagattgtactgagagtgcaccatatgcggtgtgaaataccgcacagatgcgtaaggagaaaataccgcatcaggcgccattcgccattcaggctgcgcaactgttgggaagggcgatcggtgcgggcctcttcgctattacgccagctggcgaaagggggatgtgctgcaaggcgattaagttgggtaacgccagggttttcccagtcacgacgttgtaaaacgacggccagtgaattgacgcgttgcggctgcatgaaatcctggccggtttgtctgatgccaagctggcggcctggccggccagcttggccgctgaagaaaccgagcgccgccgtctaaaaaggtgatgtgtatttgagtaaaacagcttgcgtcatgcggtcgctgcgtatatgatgcgatgagtaaataaacaaatacgcaaggggaacgcatgaaggttatcgctgtacttaaccagaaaggcgggtcaggcaagacgaccatcgcaacccatctagcccgcgccctgcaactcgccggggccgatgttctgttagtcgattccgatccccagggcagtgcccgcgattgggcggccgtgcgggaagatcaaccgctaaccgttgtcggcatcgaccgcccgacgattgaccgcgacgtgaaggccatcggccggcgcgacttcgtagtgatcgacggagcgccccaggcggcggacttggctgtgtccgcgatcaaggcagccgacttcgtgctgattccggtgcagccaagcccttacgacatatgggccaccgccgacctggtggagctggttaagcagcgcattgaggtcacggatggaaggctacaagcggcctttgtcgtgtcgcgggcgatcaaaggcacgcgcatcggcggtgaggttgccgaggcgctggccgggtacgagctgcccattcttgagtcccgtatcacgcagcgcgtgagctacccaggcactgccgccgccggcacaaccgttcttgaatcagaacccgagggcgacgctgcccgcgaggtccaggcgctggccgctgaaattaaatcaaaactcatttgagttaatgaggtaaagagaaaatgagcaaaagcacaaacacgctaagtgccggccgtccgagcgcacgcagcagcaaggctgcaacgttggccagcctggcagacacgccagccatgaagcgggtcaactttcagttgccggcggaggatcacaccaagctgaagatgtacgcggtacgccaaggcaagaccattaccgagctgctatctgaatacatcgcgcagctaccagagtaaatgagcaaatgaataaatgagtagatgaattttagcggctaaaggaggcggcatggaaaatcaagaacaaccaggcaccgacgccgtggaatgccccatgtgtggaggaacgggcggttggccaggcgtaagcggctgggttgtctgccggccctgcaatggcactggaacccccaagcccgaggaatcggcgtgagcggtcgcaaaccatccggcccggtacaaatcggcgcggcgctgggtgatgacctggtggagaagttgaaggccgcgcaggccgcccagcggcaacgcatcgaggcagaagcacgccccggtgaatcgtggcaagcggccgctgatcgaatccgcaaagaatcccggcaaccgccggcagccggtgcgccgtcgattaggaagccgcccaagggcgacgagcaaccagattttttcgttccgatgctctatgacgtgggcacccgcgatagtcgcagcatcatggacgtggccgttttccgtctgtcgaagcgtgaccgacgagctggcgaggtgatccgctacgagcttccagacgggcacgtagaggtttccgcagggccggccggcatggccagtgtgtgggattacgacctggtactgatggcggtttcccatctaaccgaatccatgaaccgataccgggaagggaagggagacaagcccggccgcgtgttccgtccacacgttgcggacgtactcaagttctgccggcgagccgatggcggaaagcagaaagacgacctggtagaaacctgcattcggttaaacaccacgcacgttgccatgcagcgtacgaagaaggccaagaacggccgcctggtgacggtatccgagggtgaagccttgattagccgctacaagatcgtaaagagcgaaaccgggcggccggagtacatcgagatcgagctagctgattggatgtaccgcgagatcacagaaggcaagaacccggacgtgctgacggttcaccccgattactttttgatcgatcccggcatcggccgttttctctaccgcctggcacgccgcgccgcaggcaaggcagaagccagatggttgttcaagacgatctacgaacgcagtggcagcgccggagagttcaagaagttctgtttcaccgtgcgcaagctgatcgggtcaaatgacctgccggagtacgatttgaaggaggaggcggggcaggctggcccgatcctagtcatgcgctaccgcaacctgatcgagggcgaagcatccgccggttcctaatgtacggagcagatgctagggcaaattgccctagcaggggaaaaaggtcgaaaaggtctctttcctgtggatagcacgtacattgggaacccaaagccgtacattgggaaccggaacccgtacattgggaacccaaagccgtacattgggaaccggtcacacatgtaagtgactgatataaaagagaaaaaaggcgatttttccgcctaaaactctttaaaacttattaaaactcttaaaacccgcctggcctgtgcatatgctagtcatgccccgcgcccaccggaaggagctgactgggttgaaggctctcaagggcatcggtcgagatcccggtgcctaatgagtgagctaacttacattaattgcgttgcgccccgggatgagattatcaaaaaggatcttcacctagatccttttaaattaaaaatgaagttttaaatcaatctaaagtatatatgtgtaacattggtctagtgattggatccttgacagctagctcagtcctaggtactgtgctagcgctagcaaagaggagaaaggtaccatgcccgatcgagctcaagttatcattcgcattgtgccgggaggtggcaccaagacccttcaacaaattatcaatcagttggagtatctatcccggaagggcaggctggagctgcagcgttcagcccgacatctcgatattcccctgccaccggatcaaatccacgaacttgcccgaagctgggttcaagagactggaacttatgacgaaagtcagccagacgaggaaaggcaacaggagttgaccacccatattattgtaagcttccccgccggtacaagccaggtagcggcttatgcggcgagccgggagtgggcagccgagatgtttgggtcaggcgcaggggggggccgatacaactatcttacggccttccacatcgatcgcgaccacccacatctgcatgtcgtcgtcaatcggcgcgaacttttaggacacggctggctgaagatatctcggcgccatccccaactgaattacgacgccctgcgcataaagatggccgagatttcacttcgtcatggcattgccctcgatgcgagccgacgagcagaacgtggcatcaccgagcggccgatcacttatgcccaatatcggcgccttgagcgggagcaggctcgccaaatccgtttcgaagacgcggatttggaacagtcgtcgccgcaaggagatcatccagaattcagccaacctttcgatacatccccatttgaagcatccgcgggcggaccggaggacatgcctcggcccaacaatcggcagaatgagtcgcaagttcatctccaggagccagctggtgtcagcaacgaagccggtgtccttgtgcgggttgcattggaaacggagcgccttgctcaaccattcgtttccgaaaccattctcgcggacgacatagggagcggctcttcgcgtgttgccgagggccgtgtggagagcgcaaaccgcactcccgatattcctcgcgcagcaactgaagctgccacgcacacgacacacgaccggcagcggcgtgcaaagcgtcctcatgatgacgacggagggccgagtggagcaaaacgtgtgacattggaaggcatcgcggttgggccccaggcgaacgccggcgaacaggatggcagtagtggccccttagtacggcaagctggaacgtcacggccatctccaccgacggccacgacgcgggccagcaccgcaaccgattcattgtctgctacagcccacctccagcaacggagaggtgtcctttcaaagcgtccgcgtgaagatgatgatggagaaccgagtgaacgcaaacgcgagagagatgagcgcagcaaggacgggcgtgggggaaataggagatagtctagaccaggcatcaaataaaacgaaaggctcagtcgaaagactgggcctttcgttttatctgttgtttgtcggtgaacgctctctactagagtcacactggctcaccttcgggtgggcctttctgcgtttatagtacgatatcccaatggcgcgccgagcttggctcgagcatggtcatagctgtttcctgtgtgaaattgttatccgctcacaattccacacaacatacgagccggaagcataaagtgtaaagcctggggtgcctaatgagtgagctaactcacattaattgcgttgcgctcactgcccgctttccagtcgggaaacctgtcgtgccagctgcattaatgaatcggccaacgcgcggggagaggcggtttgcgtattgggcgctgttccgcttcctcgctcactgactcgctgcgctcggtcgttcggctgcggcgagcggtatcagctcactcaaaggcggtaatacggttatccacagaatcaggggataacgcaggaaagaacatgtgagcaaaaggccagcaaaaggccaggaaccgtaaaaaggccgcgttgctggcgtttttccataggctccgcccccctgacgagcatcacaaaaatcgacgctcaagtcagaggtggcgaaacccgacaggactataaagataccaggcgtttccccctggaagctccctcgtgcgctctcctgttccgaccctgccgcttaccggatacctgtccgcctttctcccttcgggaagcgtggcgctttctcatagctcacgctgtaggtatctcagttcggtgtaggtcgttcgctccaagctgggctgtgtgcacgaaccccccgttcagcccgaccgctgcgccttatccggtaactatcgtcttgagtccaacccggtaagacacgacttatcgccactggcagcagccactggtaacaggattagcagagcgaggtatgtaggcggtgctacagagttcttgaagtggtggcctaactacggctacactagaagaacagtatttggtatctgcgctctgctgaagccagttaccttcggaaaaagagttggtagctcttgatccggcaaacaaaccaccgctggtagcggtggtttttttgtttgcaagcagcagattacgcgcagaaaaaaaggatctcaagaagatcctttgatcttttctacggggtctgacgctcagtggaacgaaaactcacgttaagggattttggtcatgagattatcaaaaaggatcttcacctagatccttttaaattaaaaatgaagttttaaatcaatctaaagtatatatgagtaaacttggtctgacagttagaaaaactcatcgagcatcaaatgaaactgcaatttattcatatcaggattatcaataccatatttttgaaaaagccgtttctgtaatgaaggagaaaactcaccgaggcagttccataggatggcaagatcctggtatcggtctgcgattccgactcgtccaacatcaatacaacctattaatttcccctcgtcaaaaataaggttatcaagtgagaaatcaccatgagtgacgactgaatccggtgagaatggcaaaagtttatgcatttctttccagacttgttcaacaggccagccattacgctcgtcatcaaaatcactcgcatcaaccaaaccgttattcattcgtgattgcgcctgagcgaaacgaaatacgcgatcgctgttaaaaggacaattacaaacaggaatcgaatgcaaccggcgcaggaacactgccagcgcatcaacaatattttcacctgaatcaggatattcttctaatacctggaatgctgttttcccagggatcgcagtggtgagtaaccatgcatcatcaggagtacggataaaatgcttgatggtcggaagaggcataaattccgtcagccagtttagtctgaccatctcatctgtaacatcattggcaacgctacctttgccatgtttcagaaacaactctggcgcatcgggcttcccatacaatcgatagattgtcgcacctgattgcccgacattatcgcgagcccatttatacccatataaatcagcatccatgttggaatttaatcgcggcctagagcaagacgtttcccgttgaatatggctcatactcttcctttttcaatattattgaagcatttatcagggttattgtctcatgagcggatacatatttgaatgtatttagaaaaataaacaaataggggttccgcgcacatttccccgaaaagtgccacctgacgtctaagaaaccattattatcatgacattaacctataaaaataggcgtatcacgaggcccttttgtc

SEQ ID NO: 120 - DNA, 7378 bp, synthetic construct
  misc_feature 1..7378: note = pWISE3115 Full Plasmid Sequence
  source 1..7378: mol_type = other DNA
gcccaccggaaggagctgactgggttgaaggctctcaagggcatcggtcgagatcccggtgcctaatgagtgagctaacttacattaattgcgttgcgccccgggatgagattatcaaaaaggatcttcacctagatccttttaaattaaaaatgaagttttaaatcaatctaaagtatatatgtgtaacattggtctagtgattggatccttgacagctagctcagtcctaggtactgtgctagcgctagcaaagaggagaaaggtaccatgcccgatcgagctcaagttatcattcgcattgtgccgggaggtggcaccaagacccttcaacaaattatcaatcagttggagtatctatcccggaagggcaggctggagctgcagcgttcagcccgacatctcgatattcccctgccaccggatcaaatccacgaacttgcccgaagctgggttcaagagactggaacttatgacgaaagtcagccagacgaggaaaggcaacaggagttgaccacccatattattgtaagcttccccgccggtacaagccaggtagcggcttatgcggcgagccgggagtgggcagccgagatgtttgggtcaggcgcaggggggggccgatacaactatcttacggccttccacatcgatcgcgaccacccacatctgcatgtcgtcgtcaatcggcgcgaacttttaggacacggctggctgaagatatctcggcgccatccccaactgaattacgacgccctgcgcataaagatggccgagatttcacttcgtcatggcattgccctcgatgcgagccgacgagcagaacgtggcatcaccgagcggccgatcacttatgcccaatatcggcgccttgagcgggagcaggctcgccaaatccgtttcgaagacgcggatttggaacagtcgtcgccgcaaggagatcatccagaattcagccaacctttcgatacatccccatttgaagcatccgcgggcggaccggaggacatgcctcggcccaacaatcggcagaatgagtcgcaagttcatctccaggagccagctggtgtcagcaacgaagccggtgtccttgtgcgggttgcattggaaacggagcgccttgctcaaccattcgtttccgaaaccattctcgcggacgacatagggagcggctcttcgcgtgttgccgagggccgtgtggagagcgcaaaccgcactcccgatattcctcgcgcagcaactgaagctgccacgcacacgacacacgaccggcagcggcgtgcaaagcgtcctcatgatgacgacggagggccgagtggagcaaaacgtgtgacattggaaggcatcgcggttgggccccaggcgaacgccggcgaacaggatggcagtagtggccccttagtacggcaagctggaacgtcacggccatctccaccgacggccacgacgcgggccagcaccgcaaccgattcattgtctgctacagcccacctccagcaacggagaggtgtcctttcaaagcgtccgcgtgaagatgatgatggagaaccgagtgaacgcaaacgcgagagagatgagcgcagcaaggacgggcgtgggggaaataggagaagcggtggctcctcgggtggcagcatgagcggatcaaaaaaaagaaggatcaagcaagatgcggagtacgtgcgtgctttgtttgatttcaacggcaacgatgaagaagacctgccattcaaaaagggcgacatcctgcgtattcgtgataaaccggaagagcagtggtggaatgcagaggacagcgaaggtaagcgcggtatgatcccggttccgtatgtcgagaagtactccggtggcagttccggtggcagcagtgcgtcgttagcaagaggcggtccaaatgcagtgggactcctaacgacgaacgaaagctttgagaaaaatatcaatgaggtctacaaccgtacgcgagccgagctagacgcttcttcacgtgacagaagtcgctctggactatcgcgataatctagaccaggcatcaaataaaacgaaaggctcagtcgaaagactgggcctttcgttttatctgttgtttgtcggtgaacgctctctactagagtcacactggctcaccttcgggtgggcctttctgcgtttatagtacgatatcccaatggcgcgccgagcttggctcgagcatggtcatagctgtttcctgtgtgaaattgttatccgctcacaattccacacaacatacgagccggaagcataaagtgtaaagcctggggtgcctaatgagtgagctaactcacattaattgcgttgcgctcactgcccgctttccagtcgggaaacctgtcgtgccagctgcattaatgaatcggccaacgcgcggggagaggcggtttgcgtattgggcgctgttccgcttcctcgctcactgactcgctgcgctcggtcgttcggctgcggcgagcggtatcagctcactcaaaggcggtaatacggttatccacagaatcaggggataacgcaggaaagaacatgtgagcaaaaggccagcaaaaggccaggaaccgtaaaaaggccgcgttgctggcgtttttccataggctccgcccccctgacgagcatcacaaaaatcgacgctcaagtcagaggtggcgaaacccgacaggactataaagataccaggcgtttccccctggaagctccctcgtgcgctctcctgttccgaccctgccgcttaccggatacctgtccgcctttctcccttcgggaagcgtggcgctttctcatagctcacgctgtaggtatctcagttcggtgtaggtcgttcgctccaagctgggctgtgtgcacgaaccccccgttcagcccgaccgctgcgccttatccggtaactatcgtcttgagtccaacccggtaagacacgacttatcgccactggcagcagccactggtaacaggattagcagagcgaggtatgtaggcggtgctacagagttcttgaagtggtggcctaactacggctacactagaagaacagtatttggtatctgcgctctgctgaagccagttaccttcggaaaaagagttggtagctcttgatccggcaaacaaaccaccgctggtagcggtggtttttttgtttgcaagcagcagattacgcgcagaaaaaaaggatctcaagaagatcctttgatcttttctacggggtctgacgctcagtggaacgaaaactcacgttaagggattttggtcatgagattatcaaaaaggatcttcacctagatccttttaaattaaaaatgaagttttaaatcaatctaaagtatatatgagtaaacttggtctgacagttagaaaaactcatcgagcatcaaatgaaactgcaatttattcatatcaggattatcaataccatatttttgaaaaagccgtttctgtaatgaaggagaaaactcaccgaggcagttccataggatggcaagatcctggtatcggtctgcgattccgactcgtccaacatcaatacaacctattaatttcccctcgtcaaaaataaggttatcaagtgagaaatcaccatgagtgacgactgaatccggtgagaatggcaaaagtttatgcatttctttccagacttgttcaacaggccagccattacgctcgtcatcaaaatcactcgcatcaaccaaaccgttattcattcgtgattgcgcctgagcgaaacgaaatacgcgatcgctgttaaaaggacaattacaaacaggaatcgaatgcaaccggcgcaggaacactgccagcgcatcaacaatattttcacctgaatcaggatattcttctaatacctggaatgctgttttcccagggatcgcagtggtgagtaaccatgcatcatcaggagtacggataaaatgcttgatggtcggaagaggcataaattccgtcagccagtttagtctgaccatctcatctgtaacatcattggcaacgctacctttgccatgtttcagaaacaactctggcgcatcgggcttcccatacaatcgatagattgtcgcacctgattgcccgacattatcgcgagcccatttatacccatataaatcagcatccatgttggaatttaatcgcggcctagagcaagacgtttcccgttgaatatggctcatactcttcctttttcaatattattgaagcatttatcagggttattgtctcatgagcggatacatatttgaatgtatttagaaaaataaacaaataggggttccgcgcacatttccccgaaaagtgccacctgacgtctaagaaaccattattatcatgacattaacctataaaaataggcgtatcacgaggcccttttgtctcgcgcgtttcggtgatgacggtgaaaacctctgacacatgcagctcccggagactgtcacagcttgtctgtaagcggatgccgggagcagacaagcccgtcagggcgcgtcagcgggtgttggcgggtgtcggggctggcttaactatgcggcatcagagcagattgtactgagagtgcaccatatgcggtgtgaaataccgcacagatgcgtaaggagaaaataccgcatcaggcgccattcgccattcaggctgcgcaactgttgggaagggcgatcggtgcgggcctcttcgctattacgccagctggcgaaagggggatgtgctgcaaggcgattaagttgggtaacgccagggttttcccagtcacgacgttgtaaaacgacggccagtgaattgacgcgttgcggctgcatgaaatcctggccggtttgtctgatgccaagctggcggcctggccggccagcttggccgctgaagaaaccgagcgccgccgtctaaaaaggtgatgtgtatttgagtaaaacagcttgcgtcatgcggtcgctgcgtatatgatgcgatgagtaaataaacaaatacgcaaggggaacgcatgaaggttatcgctgtacttaaccagaaaggcgggtcaggcaagacgaccatcgcaacccatctagcccgcgccctgcaactcgccggggccgatgttctgttagtcgattccgatccccagggcagtgcccgcgattgggcggccgtgcgggaagatcaaccgctaaccgttgtcggcatcgaccgcccgacgattgaccgcgacgtgaaggccatcggccggcgcgacttcgtagtgatcgacggagcgccccaggcggcggacttggctgtgtccgcgatcaaggcagccgacttcgtgctgattccggtgcagccaagcccttacgacatatgggccaccgccgacctggtggagctggttaagcagcgcattgaggtcacggatggaaggctacaagcggcctttgtcgtgtcgcgggcgatcaaaggcacgcgcatcggcggtgaggttgccgaggcgctggccgggtacgagctgcccattcttgagtcccgtatcacgcagcgcgtgagctacccaggcactgccgccgccggcacaaccgttcttgaatcagaacccgagggcgacgctgcccgcgaggtccaggcgctggccgctgaaattaaatcaaaactcatttgagttaatgaggtaaagagaaaatgagcaaaagcacaaacacgctaagtgccggccgtccgagcgcacgcagcagcaaggctgcaacgttggccagcctggcagacacgccagccatgaagcgggtcaactttcagttgccggcggaggatcacaccaagctgaagatgtacgcggtacgccaaggcaagaccattaccgagctgctatctgaatacatcgcgcagctaccagagtaaatgagcaaatgaataaatgagtagatgaattttagcggctaaaggaggcggcatggaaaatcaagaacaaccaggcaccgacgccgtggaatgccccatgtgtggaggaacgggcggttggccaggcgtaagcggctgggttgtctgccggccctgcaatggcactggaacccccaagcccgaggaatcggcgtgagcggtcgcaaaccatccggcccggtacaaatcggcgcggcgctgggtgatgacctggtggagaagttgaaggccgcgcaggccgcccagcggcaacgcatcgaggcagaagcacgccccggtgaatcgtggcaagcggccgctgatcgaatccgcaaagaatcccggcaaccgccggcagccggtgcgccgtcgattaggaagccgcccaagggcgacgagcaaccagattttttcgttccgatgctctatgacgtgggcacccgcgatagtcgcagcatcatggacgtggccgttttccgtctgtcgaagcgtgaccgacgagctggcgaggtgatccgctacgagcttccagacgggcacgtagaggtttccgcagggccggccggcatggccagtgtgtgggattacgacctggtactgatggcggtttcccatctaaccgaatccatgaaccgataccgggaagggaagggagacaagcccggccgcgtgttccgtccacacgttgcggacgtactcaagttctgccggcgagccgatggcggaaagcagaaagacgacctggtagaaacctgcattcggttaaacaccacgcacgttgccatgcagcgtacgaagaaggccaagaacggccgcctggtgacggtatccgagggtgaagccttgattagccgctacaagatcgtaaagagcgaaaccgggcggccggagtacatcgagatcgagctagctgattggatgtaccgcgagatcacagaaggcaagaacccggacgtgctgacggttcaccccgattactttttgatcgatcccggcatcggccgttttctctaccgcctggcacgccgcgccgcaggcaaggcagaagccagatggttgttcaagacgatctacgaacgcagtggcagcgccggagagttcaagaagttctgtttcaccgtgcgcaagctgatcgggtcaaatgacctgccggagtacgatttgaaggaggaggcggggcaggctggcccgatcctagtcatgcgctaccgcaacctgatcgagggcgaagcatccgccggttcctaatgtacggagcagatgctagggcaaattgccctagcaggggaaaaaggtcgaaaaggtctctttcctgtggatagcacgtacattgggaacccaaagccgtacattgggaaccggaacccgtacattgggaacccaaagccgtacattgggaaccggtcacacatgtaagtgactgatataaaagagaaaaaaggcgatttttccgcctaaaactctttaaaacttattaaaactcttaaaacccgcctggcctgtgcatatgctagtcatgccccgc

SEQ ID NO: 121 - DNA, 7234 bp, synthetic construct
  misc_feature 1..7234: note = pWISE3122 Full Plasmid Sequence
  source 1..7234: mol_type = other DNA
accggaaggagctgactgggttgaaggctctcaagggcatcggtcgagatcccggtgcctaatgagtgagctaacttacattaattgcgttgcgccccgggatgagattatcaaaaaggatcttcacctagatccttttaaattaaaaatgaagttttaaatcaatctaaagtatatatgtgtaacattggtctagtgattggatccttgacagctagctcagtcctaggtactgtgctagcgctagcaaagaggagaaaggtaccatgcccgatcgagctcaagttatcattcgcattgtgccgggaggtggcaccaagacccttcaacaaattatcaatcagttggagtatctatcccggaagggcaggctggagctgcagcgttcagcccgacatctcgatattcccctgccaccggatcaaatccacgaacttgcccgaagctgggttcaagagactggaacttatgacgaaagtcagccagacgaggaaaggcaacaggagttgaccacccatattattgtaagcttccccgccggtacaagccaggtagcggcttatgcggcgagccgggagtgggcagccgagatgtttgggtcaggcgcaggggggggccgatacaactatcttacggccttccacatcgatcgcgaccacccacatctgcatgtcgtcgtcaatcggcgcgaacttttaggacacggctggctgaagatatctcggcgccatccccaactgaattacgacgccctgcgcataaagatggccgagatttcacttcgtcatggcattgccctcgatgcgagccgacgagcagaacgtggcatcaccgagcggccgatcacttatgcccaatatcggcgccttgagcgggagcaggctcgccaaatccgtttcgaagacgcggatttggaacagtcgtcgccgcaaggagatcatccagaattcagccaacctttcgatacatccccatttgaagcatccgcgggcggaccggaggacatgcctcggcccaacaatcggcagaatgagtcgcaagttcatctccaggagccagctggtgtcagcaacgaagccggtgtccttgtgcgggttgcattggaaacggagcgccttgctcaaccattcgtttccgaaaccattctcgcggacgacatagggagcggctcttcgcgtgttgccgagggccgtgtggagagcgcaaaccgcactcccgatattcctcgcgcagcaactgaagctgccacgcacacgacacacgaccggcagcggcgtgcaaagcgtcctcatgatgacgacggagggccgagtggagcaaaacgtgtgacattggaaggcatcgcggttgggccccaggcgaacgccggcgaacaggatggcagtagtgggggctcctcgggtggcagcatgagcggatcaaaaaaaagaaggatcaagcaagatgcggagtacgtgcgtgctttgtttgatttcaacggcaacgatgaagaagacctgccattcaaaaagggcgacatcctgcgtattcgtgataaaccggaagagcagtggtggaatgcagaggacagcgaaggtaagcgcggtatgatcccggttccgtatgtcgagaagtactccggtagtggggggtcctctggtggaagtagtggccccttagtacggcaagctggaacgtcacggccatctccaccgacggccacgacgcgggccagcaccgcaaccgattcattgtctgctacagcccacctccagcaacggagaggtgtcctttcaaagcgtccgcgtgaagatgatgatggagaaccgagtgaacgcaaacgcgagagagatgagcgcagcaaggacgggcgtgggggaaataggagatagtctagaccaggcatcaaataaaacgaaaggctcagtcgaaagactgggcctttcgttttatctgttgtttgtcggtgaacgctctctactagagtcacactggctcaccttcgggtgggcctttctgcgtttatagtacgatatcccaatggcgcgccgagcttggctcgagcatggtcatagctgtttcctgtgtgaaattgttatccgctcacaattccacacaacatacgagccggaagcataaagtgtaaagcctggggtgcctaatgagtgagctaactcacattaattgcgttgcgctcactgcccgctttccagtcgggaaacctgtcgtgccagctgcattaatgaatcggccaacgcgcggggagaggcggtttgcgtattgggcgctgttccgcttcctcgctcactgactcgctgcgctcggtcgttcggctgcggcgagcggtatcagctcactcaaaggcggtaatacggttatccacagaatcaggggataacgcaggaaagaacatgtgagcaaaaggccagcaaaaggccaggaaccgtaaaaaggccgcgttgctggcgtttttccataggctccgcccccctgacgagcatcacaaaaatcgacgctcaagtcagaggtggcgaaacccgacaggactataaagataccaggcgtttccccctggaagctccctcgtgcgctctcctgttccgaccctgccgcttaccggatacctgtccgcctttctcccttcgggaagcgtggcgctttctcatagctcacgctgtaggtatctcagttcggtgtaggtcgttcgctccaagctgggctgtgtgcacgaaccccccgttcagcccgaccgctgcgccttatccggtaactatcgtcttgagtccaacccggtaagacacgacttatcgccactggcagcagccactggtaacaggattagcagagcgaggtatgtaggcggtgctacagagttcttgaagtggtggcctaactacggctacactagaagaacagtatttggtatctgcgctctgctgaagccagttaccttcggaaaaagagttggtagctcttgatccggcaaacaaaccaccgctggtagcggtggtttttttgtttgcaagcagcagattacgcgcagaaaaaaaggatctcaagaagatcctttgatcttttctacggggtctgacgctcagtggaacgaaaactcacgttaagggattttggtcatgagattatcaaaaaggatcttcacctagatccttttaaattaaaaatgaagttttaaatcaatctaaagtatatatgagtaaacttggtctgacagttagaaaaactcatcgagcatcaaatgaaactgcaatttattcatatcaggattatcaataccatatttttgaaaaagccgtttctgtaatgaaggagaaaactcaccgaggcagttccataggatggcaagatcctggtatcggtctgcgattccgactcgtccaacatcaatacaacctattaatttcccctcgtcaaaaataaggttatcaagtgagaaatcaccatgagtgacgactgaatccggtgagaatggcaaaagtttatgcatttctttccagacttgttcaacaggccagccattacgctcgtcatcaaaatcactcgcatcaaccaaaccgttattcattcgtgattgcgcctgagcgaaacgaaatacgcgatcgctgttaaaaggacaattacaaacaggaatcgaatgcaaccggcgcaggaacactgccagcgcatcaacaatattttcacctgaatcaggatattcttctaatacctggaatgctgttttcccagggatcgcagtggtgagtaaccatgcatcatcaggagtacggataaaatgcttgatggtcggaagaggcataaattccgtcagccagtttagtctgaccatctcatctgtaacatcattggcaacgctacctttgccatgtttcagaaacaactctggcgcatcgggcttcccatacaatcgatagattgtcgcacctgattgcccgacattatcgcgagcccatttatacccatataaatcagcatccatgttggaatttaatcgcggcctagagcaagacgtttcccgttgaatatggctcatactcttcctttttcaatattattgaagcatttatcagggttattgtctcatgagcggatacatatttgaatgtatttagaaaaataaacaaataggggttccgcgcacatttccccgaaaagtgccacctgacgtctaagaaaccattattatcatgacattaacctataaaaataggcgtatcacgaggcccttttgtctcgcgcgtttcggtgatgacggtgaaaacctctgacacatgcagctcccggagactgtcacagcttgtctgtaagcggatgccgggagcagacaagcccgtcagggcgcgtcagcgggtgttggcgggtgtcggggctggcttaactatgcggcatcagagcagattgtactgagagtgcaccatatgcggtgtgaaataccgcacagatgcgtaaggagaaaataccgcatcaggcgccattcgccattcaggctgcgcaactgttgggaagggcgatcggtgcgggcctcttcgctattacgccagctggcgaaagggggatgtgctgcaaggcgattaagttgggtaacgccagggttttcccagtcacgacgttgtaaaacgacggccagtgaattgacgcgttgcggctgcatgaaatcctggccggtttgtctgatgccaagctggcggcctggccggccagcttggccgctgaagaaaccgagcgccgccgtctaaaaaggtgatgtgtatttgagtaaaacagcttgcgtcatgcggtcgctgcgtatatgatgcgatgagtaaataaacaaatacgcaaggggaacgcatgaaggttatcgctgtacttaaccagaaaggcgggtcaggcaagacgaccatcgcaacccatctagcccgcgccctgcaactcgccggggccgatgttctgttagtcgattccgatccccagggcagtgcccgcgattgggcggccgtgcgggaagatcaaccgctaaccgttgtcggcatcgaccgcccgacgattgaccgcgacgtgaaggccatcggccggcgcgacttcgtagtgatcgacggagcgccccaggcggcggacttggctgtgtccgcgatcaaggcagccgacttcgtgctgattccggtgcagccaagcccttacgacatatgggccaccgccgacctggtggagctggttaagcagcgcattgaggtcacggatggaaggctacaagcggcctttgtcgtgtcgcgggcgatcaaaggcacgcgcatcggcggtgaggttgccgaggcgctggccgggtacgagctgcccattcttgagtcccgtatcacgcagcgcgtgagctacccaggcactgccgccgccggcacaaccgttcttgaatcagaacccgagggcgacgctgcccgcgaggtccaggcgctggccgctgaaattaaatcaaaactcatttgagttaatgaggtaaagagaaaatgagcaaaagcacaaacacgctaagtgccggccgtccgagcgcacgcagcagcaaggctgcaacgttggccagcctggcagacacgccagccatgaagcgggtcaactttcagttgccggcggaggatcacaccaagctgaagatgtacgcggtacgccaaggcaagaccattaccgagctgctatctgaatacatcgcgcagctaccagagtaaatgagcaaatgaataaatgagtagatgaattttagcggctaaaggaggcggcatggaaaatcaagaacaaccaggcaccgacgccgtggaatgccccatgtgtggaggaacgggcggttggccaggcgtaagcggctgggttgtctgccggccctgcaatggcactggaacccccaagcccgaggaatcggcgtgagcggtcgcaaaccatccggcccggtacaaatcggcgcggcgctgggtgatgacctggtggagaagttgaaggccgcgcaggccgcccagcggcaacgcatcgaggcagaagcacgccccggtgaatcgtggcaagcggccgctgatcgaatccgcaaagaatcccggcaaccgccggcagccggtgcgccgtcgattaggaagccgcccaagggcgacgagcaaccagattttttcgttccgatgctctatgacgtgggcacccgcgatagtcgcagcatcatggacgtggccgttttccgtctgtcgaagcgtgaccgacgagctggcgaggtgatccgctacgagcttccagacgggcacgtagaggtttccgcagggccggccggcatggccagtgtgtgggattacgacctggtactgatggcggtttcccatctaaccgaatccatgaaccgataccgggaagggaagggagacaagcccggccgcgtgttccgtccacacgttgcggacgtactcaagttctgccggcgagccgatggcggaaagcagaaagacgacctggtagaaacctgcattcggttaaacaccacgcacgttgccatgcagcgtacgaagaaggccaagaacggccgcctggtgacggtatccgagggtgaagccttgattagccgctacaagatcgtaaagagcgaaaccgggcggccggagtacatcgagatcgagctagctgattggatgtaccgcgagatcacagaaggcaagaacccggacgtgctgacggttcaccccgattactttttgatcgatcccggcatcggccgttttctctaccgcctggcacgccgcgccgcaggcaaggcagaagccagatggttgttcaagacgatctacgaacgcagtggcagcgccggagagttcaagaagttctgtttcaccgtgcgcaagctgatcgggtcaaatgacctgccggagtacgatttgaaggaggaggcggggcaggctggcccgatcctagtcatgcgctaccgcaacctgatcgagggcgaagcatccgccggttcctaatgtacggagcagatgctagggcaaattgccctagcaggggaaaaaggtcgaaaaggtctctttcctgtggatagcacgtacattgggaacccaaagccgtacattgggaaccggaacccgtacattgggaacccaaagccgtacattgggaaccggtcacacatgtaagtgactgatataaaagagaaaaaaggcgatttttccgcctaaaactctttaaaacttattaaaactcttaaaacccgcctggcctgtgcatatgctagtcatgccccgcgccc

SEQ ID NO: 122 - DNA, 7309 bp, synthetic construct
  misc_feature 1..7309: note = pWISE3109 Full Plasmid Sequence
  source 1..7309: mol_type = other DNA
cgcccaccggaaggagctgactgggttgaaggctctcaagggcatcggtcgagatcccggtgcctaatgagtgagctaacttacattaattgcgttgcgccccgggatgagattatcaaaaaggatcttcacctagatccttttaaattaaaaatgaagttttaaatcaatctaaagtatatatgtgtaacattggtctagtgattggatccttgacagctagctcagtcctaggtactgtgctagcgctagcaaagaggagaaaggtaccatgagcggatcaaaaaaaagaaggatcaagcaagatccgccgccagcgctgccgcccaagcgccgtcgctccggcggtagcagcggtggttccccgccgccggctctgccgccgaagcgccgtagaagcggcggttcaagcggtggctctccgccaccggcactgcctccgaaacgtcgtcgttctggcggtagcagcggtggctcgccgccgccggcgttgccgccgaaacgccgtcgttccggtggaagttccggaggttcaagcgggtctgaaacgccgggcaccagcgagtcggcgaccccggaaagcagcggtggttcttccggcggtagcatgcccgatcgagctcaagttatcattcgcattgtgccgggaggtggcaccaagacccttcaacaaattatcaatcagttggagtatctatcccggaagggcaggctggagctgcagcgttcagcccgacatctcgatattcccctgccaccggatcaaatccacgaacttgcccgaagctgggttcaagagactggaacttatgacgaaagtcagccagacgaggaaaggcaacaggagttgaccacccatattattgtaagcttccccgccggtacaagccaggtagcggcttatgcggcgagccgggagtgggcagccgagatgtttgggtcaggcgcaggggggggccgatacaactatcttacggccttccacatcgatcgcgaccacccacatctgcatgtcgtcgtcaatcggcgcgaacttttaggacacggctggctgaagatatctcggcgccatccccaactgaattacgacgccctgcgcataaagatggccgagatttcacttcgtcatggcattgccctcgatgcgagccgacgagcagaacgtggcatcaccgagcggccgatcacttatgcccaatatcggcgccttgagcgggagcaggctcgccaaatccgtttcgaagacgcggatttggaacagtcgtcgccgcaaggagatcatccagaattcagccaacctttcgatacatccccatttgaagcatccgcgggcggaccggaggacatgcctcggcccaacaatcggcagaatgagtcgcaagttcatctccaggagccagctggtgtcagcaacgaagccggtgtccttgtgcgggttgcattggaaacggagcgccttgctcaaccattcgtttccgaaaccattctcgcggacgacatagggagcggctcttcgcgtgttgccgagggccgtgtggagagcgcaaaccgcactcccgatattcctcgcgcagcaactgaagctgccacgcacacgacacacgaccggcagcggcgtgcaaagcgtcctcatgatgacgacggagggccgagtggagcaaaacgtgtgacattggaaggcatcgcggttgggccccaggcgaacgccggcgaacaggatggcagtagtggccccttagtacggcaagctggaacgtcacggccatctccaccgacggccacgacgcgggccagcaccgcaaccgattcattgtctgctacagcccacctccagcaacggagaggtgtcctttcaaagcgtccgcgtgaagatgatgatggagaaccgagtgaacgcaaacgcgagagagatgagcgcagcaaggacgggcgtgggggaaataggagatagtctagaccaggcatcaaataaaacgaaaggctcagtcgaaagactgggcctttcgttttatctgttgtttgtcggtgaacgctctctactagagtcacactggctcaccttcgggtgggcctttctgcgtttatagtacgatatcccaatggcgcgccgagcttggctcgagcatggtcatagctgtttcctgtgtgaaattgttatccgctcacaattccacacaacatacgagccggaagcataaagtgtaaagcctggggtgcctaatgagtgagctaactcacattaattgcgttgcgctcactgcccgctttccagtcgggaaacctgtcgtgccagctgcattaatgaatcggccaacgcgcggggagaggcggtttgcgtattgggcgctgttccgcttcctcgctcactgactcgctgcgctcggtcgttcggctgcggcgagcggtatcagctcactcaaaggcggtaatacggttatccacagaatcaggggataacgcaggaaagaacatgtgagcaaaaggccagcaaaaggccaggaaccgtaaaaaggccgcgttgctggcgtttttccataggctccgcccccctgacgagcatcacaaaaatcgacgctcaagtcagaggtggcgaaacccgacaggactataaagataccaggcgtttccccctggaagctccctcgtgcgctctcctgttccgaccctgccgcttaccggatacctgtccgcctttctcccttcgggaagcgtggcgctttctcatagctcacgctgtaggtatctcagttcggtgtaggtcgttcgctccaagctgggctgtgtgcacgaaccccccgttcagcccgaccgctgcgccttatccggtaactatcgtcttgagtccaacccggtaagacacgacttatcgccactggcagcagccactggtaacaggattagcagagcgaggtatgtaggcggtgctacagagttcttgaagtggtggcctaactacggctacactagaagaacagtatttggtatctgcgctctgctgaagccagttaccttcggaaaaagagttggtagctcttgatccggcaaacaaaccaccgctggtagcggtggtttttttgtttgcaagcagcagattacgcgcagaaaaaaaggatctcaagaagatcctttgatcttttctacggggtctgacgctcagtggaacgaaaactcacgttaagggattttggtcatgagattatcaaaaaggatcttcacctagatccttttaaattaaaaatgaagttttaaatcaatctaaagtatatatgagtaaacttggtctgacagttagaaaaactcatcgagcatcaaatgaaactgcaatttattcatatcaggattatcaataccatatttttgaaaaagccgtttctgtaatgaaggagaaaactcaccgaggcagttccataggatggcaagatcctggtatcggtctgcgattccgactcgtccaacatcaatacaacctattaatttcccctcgtcaaaaataaggttatcaagtgagaaatcaccatgagtgacgactgaatccggtgagaatggcaaaagtttatgcatttctttccagacttgttcaacaggccagccattacgctcgtcatcaaaatcactcgcatcaaccaaaccgttattcattcgtgattgcgcctgagcgaaacgaaatacgcgatcgctgttaaaaggacaattacaaacaggaatcgaatgcaaccggcgcaggaacactgccagcgcatcaacaatattttcacctgaatcaggatattcttctaatacctggaatgctgttttcccagggatcgcagtggtgagtaaccatgcatcatcaggagtacggataaaatgcttgatggtcggaagaggcataaattccgtcagccagtttagtctgaccatctcatctgtaacatcattggcaacgctacctttgccatgtttcagaaacaactctggcgcatcgggcttcccatacaatcgatagattgtcgcacctgattgcccgacattatcgcgagcccatttatacccatataaatcagcatccatgttggaatttaatcgcggcctagagcaagacgtttcccgttgaatatggctcatactcttcctttttcaatattattgaagcatttatcagggttattgtctcatgagcggatacatatttgaatgtatttagaaaaataaacaaataggggttccgcgcacatttccccgaaaagtgccacctgacgtctaagaaaccattattatcatgacattaacctataaaaataggcgtatcacgaggcccttttgtctcgcgcgtttcggtgatgacggtgaaaacctctgacacatgcagctcccggagactgtcacagcttgtctgtaagcggatgccgggagcagacaagcccgtcagggcgcgtcagcgggtgttggcgggtgtcggggctggcttaactatgcggcatcagagcagattgtactgagagtgcaccatatgcggtgtgaaataccgcacagatgcgtaaggagaaaataccgcatcaggcgccattcgccattcaggctgcgcaactgttgggaagggcgatcggtgcgggcctcttcgctattacgccagctggcgaaagggggatgtgctgcaaggcgattaagttgggtaacgccagggttttcccagtcacgacgttgtaaaacgacggccagtgaattgacgcgttgcggctgcatgaaatcctggccggtttgtctgatgccaagctggcggcctggccggccagcttggccgctgaagaaaccgagcgccgccgtctaaaaaggtgatgtgtatttgagtaaaacagcttgcgtcatgcggtcgctgcgtatatgatgcgatgagtaaataaacaaatacgcaaggggaacgcatgaaggttatcgctgtacttaaccagaaaggcgggtcaggcaagacgaccatcgcaacccatctagcccgcgccctgcaactcgccggggccgatgttctgttagtcgattccgatccccagggcagtgcccgcgattgggcggccgtgcgggaagatcaaccgctaaccgttgtcggcatcgaccgcccgacgattgaccgcgacgtgaaggccatcggccggcgcgacttcgtagtgatcgacggagcgccccaggcggcggacttggctgtgtccgcgatcaaggcagccgacttcgtgctgattccggtgcagccaagcccttacgacatatgggccaccgccgacctggtggagctggttaagcagcgcattgaggtcacggatggaaggctacaagcggcctttgtcgtgtcgcgggcgatcaaaggcacgcgcatcggcggtgaggttgccgaggcgctggccgggtacgagctgcccattcttgagtcccgtatcacgcagcgcgtgagctacccaggcactgccgccgccggcacaaccgttcttgaatcagaacccgagggcgacgctgcccgcgaggtccaggcgctggccgctgaaattaaatcaaaactcatttgagttaatgaggtaaagagaaaatgagcaaaagcacaaacacgctaagtgccggccgtccgagcgcacgcagcagcaaggctgcaacgttggccagcctggcagacacgccagccatgaagcgggtcaactttcagttgccggcggaggatcacaccaagctgaagatgtacgcggtacgccaaggcaagaccattaccgagctgctatctgaatacatcgcgcagctaccagagtaaatgagcaaatgaataaatgagtagatgaattttagcggctaaaggaggcggcatggaaaatcaagaacaaccaggcaccgacgccgtggaatgccccatgtgtggaggaacgggcggttggccaggcgtaagcggctgggttgtctgccggccctgcaatggcactggaacccccaagcccgaggaatcggcgtgagcggtcgcaaaccatccggcccggtacaaatcggcgcggcgctgggtgatgacctggtggagaagttgaaggccgcgcaggccgcccagcggcaacgcatcgaggcagaagcacgccccggtgaatcgtggcaagcggccgctgatcgaatccgcaaagaatcccggcaaccgccggcagccggtgcgccgtcgattaggaagccgcccaagggcgacgagcaaccagattttttcgttccgatgctctatgacgtgggcacccgcgatagtcgcagcatcatggacgtggccgttttccgtctgtcgaagcgtgaccgacgagctggcgaggtgatccgctacgagcttccagacgggcacgtagaggtttccgcagggccggccggcatggccagtgtgtgggattacgacctggtactgatggcggtttcccatctaaccgaatccatgaaccgataccgggaagggaagggagacaagcccggccgcgtgttccgtccacacgttgcggacgtactcaagttctgccggcgagccgatggcggaaagcagaaagacgacctggtagaaacctgcattcggttaaacaccacgcacgttgccatgcagcgtacgaagaaggccaagaacggccgcctggtgacggtatccgagggtgaagccttgattagccgctacaagatcgtaaagagcgaaaccgggcggccggagtacatcgagatcgagctagctgattggatgtaccgcgagatcacagaaggcaagaacccggacgtgctgacggttcaccccgattactttttgatcgatcccggcatcggccgttttctctaccgcctggcacgccgcgccgcaggcaaggcagaagccagatggttgttcaagacgatctacgaacgcagtggcagcgccggagagttcaagaagttctgtttcaccgtgcgcaagctgatcgggtcaaatgacctgccggagtacgatttgaaggaggaggcggggcaggctggcccgatcctagtcatgcgctaccgcaacctgatcgagggcgaagcatccgccggttcctaatgtacggagcagatgctagggcaaattgccctagcaggggaaaaaggtcgaaaaggtctctttcctgtggatagcacgtacattgggaacccaaagccgtacattgggaaccggaacccgtacattgggaacccaaagccgtacattgggaaccggtcacacatgtaagtgactgatataaaagagaaaaaaggcgatttttccgcctaaaactctttaaaacttattaaaactcttaaaacccgcctggcctgtgcatatgctagtcatgccccg

SEQ ID NO: 123 - DNA, 8158 bp, synthetic construct
  misc_feature 1..8158: note = pWISE3103 Full Plasmid Sequence
  source 1..8158: mol_type = other DNA
ccggaaggagctgactgggttgaaggctctcaagggcatcggtcgagatcccggtgcctaatgagtgagctaacttacattaattgcgttgcgccccgggatgagattatcaaaaaggatcttcacctagatccttttaaattaaaaatgaagttttaaatcaatctaaagtatatatgtgtaacattggtctagtgattggatccttgacagctagctcagtcctaggtactgtgctagcgctagcaaagaggagaaaggtaccatgagcggatcaaagaaaagaaggatcaagcaagatgaggaattgctgagtaaaaactaccatcttgagaacgaagttgcccgtctgaagaagggtagcggttcgggcggtagcggttccggaggtagcggcagcggctcgggtggtagcggttcaggtggctcaggcagtggtgaagaattgctgagcaaaaattatcacctggagaatgaagttgcgcgtctgaagaaaggcagcggctccggtggttctggctcgggcggttcaggtagtggttccggtggctccggcagcggtggttctggctccggtgaagagttgttgtccaagaattatcatctggaaaacgaagtggcaagactcaagaagggttcgggttcgggcggcagcggaagtggtggtagcggaagcggcagcggcggctccggctccggtggctccggcagcggtgaggagctgctgagcaagaactaccacttggagaacgaagtggcacgcctgaagaaaggtagcggtagcggcggttctgggagcggtggctccggaagcggcagcggcggttcgggttctggtggcagcggtagcggcgaagagctgcttagcaaaaattatcaccttgagaacgaggtcgctcgcctgaaaaaaggttccggcagcggcggtagcggtagcggtggcagcggtagcggcagcggtggctcggggtccggtggtagcggctccggtgaagaattgttgtccaaaaactaccacctggagaatgaagtggcgcgtctgaaaaagggtagcggcagcggtggtagcggctctggaggtagcggctccggtagtggcggtagcgggtctggcggctctggttcaggcgaagaactgctcagcaagaattaccatttggagaacgaggttgcgcgcctgaaaaagggctctggtagcggcggttctggctctggtggcagcgggagcggctccggtggcagcggctctggaggttccggttcgggtgaggagctgctgagcaagaactaccacctggaaaacgaggtggcgcgtctgaaaaaaggcagcaagaaacgtcgtatcaaacaggactccggtggaagttccggaggttcaagcgggtctgaaacgccgggcaccagcgagtcggcgaccccggaaagcagcggtggttcttccggcggtagcatgcccgatcgagctcaagttatcattcgcattgtgccgggaggtggcaccaagacccttcaacaaattatcaatcagttggagtatctatcccggaagggcaggctggagctgcagcgttcagcccgacatctcgatattcccctgccaccggatcaaatccacgaacttgcccgaagctgggttcaagagactggaacttatgacgaaagtcagccagacgaggaaaggcaacaggagttgaccacccatattattgtaagcttccccgccggtacaagccaggtagcggcttatgcggcgagccgggagtgggcagccgagatgtttgggtcaggcgcaggggggggccgatacaactatcttacggccttccacatcgatcgcgaccacccacatctgcatgtcgtcgtcaatcggcgcgaacttttaggacacggctggctgaagatatctcggcgccatccccaactgaattacgacgccctgcgcataaagatggccgagatttcacttcgtcatggcattgccctcgatgcgagccgacgagcagaacgtggcatcaccgagcggccgatcacttatgcccaatatcggcgccttgagcgggagcaggctcgccaaatccgtttcgaagacgcggatttggaacagtcgtcgccgcaaggagatcatccagaattcagccaacctttcgatacatccccatttgaagcatccgcgggcggaccggaggacatgcctcggcccaacaatcggcagaatgagtcgcaagttcatctccaggagccagctggtgtcagcaacgaagccggtgtccttgtgcgggttgcattggaaacggagcgccttgctcaaccattcgtttccgaaaccattctcgcggacgacatagggagcggctcttcgcgtgttgccgagggccgtgtggagagcgcaaaccgcactcccgatattcctcgcgcagcaactgaagctgccacgcacacgacacacgaccggcagcggcgtgcaaagcgtcctcatgatgacgacggagggccgagtggagcaaaacgtgtgacattggaaggcatcgcggttgggccccaggcgaacgccggcgaacaggatggcagtagtggccccttagtacggcaagctggaacgtcacggccatctccaccgacggccacgacgcgggccagcaccgcaaccgattcattgtctgctacagcccacctccagcaacggagaggtgtcctttcaaagcgtccgcgtgaagatgatgatggagaaccgagtgaacgcaaacgcgagagagatgagcgcagcaaggacgggcgtgggggaaataggagatagtctagaccaggcatcaaataaaacgaaaggctcagtcgaaagactgggcctttcgttttatctgttgtttgtcggtgaacgctctctactagagtcacactggctcaccttcgggtgggcctttctgcgtttatagtacgatatcccaatggcgcgccgagcttggctcgagcatggtcatagctgtttcctgtgtgaaattgttatccgctcacaattccacacaacatacgagccggaagcataaagtgtaaagcctggggtgcctaatgagtgagctaactcacattaattgcgttgcgctcactgcccgctttccagtcgggaaacctgtcgtgccagctgcattaatgaatcggccaacgcgcggggagaggcggtttgcgtattgggcgctgttccgcttcctcgctcactgactcgctgcgctcggtcgttcggctgcggcgagcggtatcagctcactcaaaggcggtaatacggttatccacagaatcaggggataacgcaggaaagaacatgtgagcaaaaggccagcaaaaggccaggaaccgtaaaaaggccgcgttgctggcgtttttccataggctccgcccccctgacgagcatcacaaaaatcgacgctcaagtcagaggtggcgaaacccgacaggactataaagataccaggcgtttccccctggaagctccctcgtgcgctctcctgttccgaccctgccgcttaccggatacctgtccgcctttctcccttcgggaagcgtggcgctttctcatagctcacgctgtaggtatctcagttcggtgtaggtcgttcgctccaagctgggctgtgtgcacgaaccccccgttcagcccgaccgctgcgccttatccggtaactatcgtcttgagtccaacccggtaagacacgacttatcgccactggcagcagccactggtaacaggattagcagagcgaggtatgtaggcggtgctacagagttcttgaagtggtggcctaactacggctacactagaagaacagtatttggtatctgcgctctgctgaagccagttaccttcggaaaaagagttggtagctcttgatccggcaaacaaaccaccgctggtagcggtggtttttttgtttgcaagcagcagattacgcgcagaaaaaaaggatctcaagaagatcctttgatcttttctacggggtctgacgctcagtggaacgaaaactcacgttaagggattttggtcatgagattatcaaaaaggatcttcacctagatccttttaaattaaaaatgaagttttaaatcaatctaaagtatatatgagtaaacttggtctgacagttagaaaaactcatcgagcatcaaatgaaactgcaatttattcatatcaggattatcaataccatatttttgaaaaagccgtttctgtaatgaaggagaaaactcaccgaggcagttccataggatggcaagatcctggtatcggtctgcgattccgactcgtccaacatcaatacaacctattaatttcccctcgtcaaaaataaggttatcaagtgagaaatcaccatgagtgacgactgaatccggtgagaatggcaaaagtttatgcatttctttccagacttgttcaacaggccagccattacgctcgtcatcaaaatcactcgcatcaaccaaaccgttattcattcgtgattgcgcctgagcgaaacgaaatacgcgatcgctgttaaaaggacaattacaaacaggaatcgaatgcaaccggcgcaggaacactgccagcgcatcaacaatattttcacctgaatcaggatattcttctaatacctggaatgctgttttcccagggatcgcagtggtgagtaaccatgcatcatcaggagtacggataaaatgcttgatggtcggaagaggcataaattccgtcagccagtttagtctgaccatctcatctgtaacatcattggcaacgctacctttgccatgtttcagaaacaactctggcgcatcgggcttcccatacaatcgatagattgtcgcacctgattgcccgacattatcgcgagcccatttatacccatataaatcagcatccatgttggaatttaatcgcggcctagagcaagacgtttcccgttgaatatggctcatactcttcctttttcaatattattgaagcatttatcagggttattgtctcatgagcggatacatatttgaatgtatttagaaaaataaacaaataggggttccgcgcacatttccccgaaaagtgccacctgacgtctaagaaaccattattatcatgacattaacctataaaaataggcgtatcacgaggcccttttgtctcgcgcgtttcggtgatgacggtgaaaacctctgacacatgcagctcccggagactgtcacagcttgtctgtaagcggatgccgggagcagacaagcccgtcagggcgcgtcagcgggtgttggcgggtgtcggggctggcttaactatgcggcatcagagcagattgtactgagagtgcaccatatgcggtgtgaaataccgcacagatgcgtaaggagaaaataccgcatcaggcgccattcgccattcaggctgcgcaactgttgggaagggcgatcggtgcgggcctcttcgctattacgccagctggcgaaagggggatgtgctgcaaggcgattaagttgggtaacgccagggttttcccagtcacgacgttgtaaaacgacggccagtgaattgacgcgttgcggctgcatgaaatcctggccggtttgtctgatgccaagctggcggcctggccggccagcttggccgctgaagaaaccgagcgccgccgtctaaaaaggtgatgtgtatttgagtaaaacagcttgcgtcatgcggtcgctgcgtatatgatgcgatgagtaaataaacaaatacgcaaggggaacgcatgaaggttatcgctgtacttaaccagaaaggcgggtcaggcaagacgaccatcgcaacccatctagcccgcgccctgcaactcgccggggccgatgttctgttagtcgattccgatccccagggcagtgcccgcgattgggcggccgtgcgggaagatcaaccgctaaccgttgtcggcatcgaccgcccgacgattgaccgcgacgtgaaggccatcggccggcgcgacttcgtagtgatcgacggagcgccccaggcggcggacttggctgtgtccgcgatcaaggcagccgacttcgtgctgattccggtgcagccaagcccttacgacatatgggccaccgccgacctggtggagctggttaagcagcgcattgaggtcacggatggaaggctacaagcggcctttgtcgtgtcgcgggcgatcaaaggcacgcgcatcggcggtgaggttgccgaggcgctggccgggtacgagctgcccattcttgagtcccgtatcacgcagcgcgtgagctacccaggcactgccgccgccggcacaaccgttcttgaatcagaacccgagggcgacgctgcccgcgaggtccaggcgctggccgctgaaattaaatcaaaactcatttgagttaatgaggtaaagagaaaatgagcaaaagcacaaacacgctaagtgccggccgtccgagcgcacgcagcagcaaggctgcaacgttggccagcctggcagacacgccagccatgaagcgggtcaactttcagttgccggcggaggatcacaccaagctgaagatgtacgcggtacgccaaggcaagaccattaccgagctgctatctgaatacatcgcgcagctaccagagtaaatgagcaaatgaataaatgagtagatgaattttagcggctaaaggaggcggcatggaaaatcaagaacaaccaggcaccgacgccgtggaatgccccatgtgtggaggaacgggcggttggccaggcgtaagcggctgggttgtctgccggccctgcaatggcactggaacccccaagcccgaggaatcggcgtgagcggtcgcaaaccatccggcccggtacaaatcggcgcggcgctgggtgatgacctggtggagaagttgaaggccgcgcaggccgcccagcggcaacgcatcgaggcagaagcacgccccggtgaatcgtggcaagcggccgctgatcgaatccgcaaagaatcccggcaaccgccggcagccggtgcgccgtcgattaggaagccgcccaagggcgacgagcaaccagattttttcgttccgatgctctatgacgtgggcacccgcgatagtcgcagcatcatggacgtggccgttttccgtctgtcgaagcgtgaccgacgagctggcgaggtgatccgctacgagcttccagacgggcacgtagaggtttccgcagggccggccggcatggccagtgtgtgggattacgacctggtactgatggcggtttcccatctaaccgaatccatgaaccgataccgggaagggaagggagacaagcccggccgcgtgttccgtccacacgttgcggacgtactcaagttctgccggcgagccgatggcggaaagcagaaagacgacctggtagaaacctgcattcggttaaacaccacgcacgttgccatgcagcgtacgaagaaggccaagaacggccgcctggtgacggtatccgagggtgaagccttgattagccgctacaagatcgtaaagagcgaaaccgggcggccggagtacatcgagatcgagctagctgattggatgtaccgcgagatcacagaaggcaagaacccggacgtgctgacggttcaccccgattactttttgatcgatcccggcatcggccgttttctctaccgcctggcacgccgcgccgcaggcaaggcagaagccagatggttgttcaagacgatctacgaacgcagtggcagcgccggagagttcaagaagttctgtttcaccgtgcgcaagctgatcgggtcaaatgacctgccggagtacgatttgaaggaggaggcggggcaggctggcccgatcctagtcatgcgctaccgcaacctgatcgagggcgaagcatccgccggttcctaatgtacggagcagatgctagggcaaattgccctagcaggggaaaaaggtcgaaaaggtctctttcctgtggatagcacgtacattgggaacccaaagccgtacattgggaaccggaacccgtacattgggaacccaaagccgtacattgggaaccggtcacacatgtaagtgactgatataaaagagaaaaaaggcgatttttccgcctaaaactctttaaaacttattaaaactcttaaaacccgcctggcctgtgcatatgctagtcatgccccgcgccca

SEQ ID NO: 124 - DNA, 12647 bp, synthetic construct
  misc_feature 1..12647: note = pWISE711 Full Plasmid Sequence
  source 1..12647: mol_type = other DNA
agcttactcgaggtcattcatatgcttgagaagagagtcgggatagtccaaaataaaacaaaggtaagattacctggtcaaaagtgaaaacatcagttaaaaggtggtataaagtaaaatatcggtaataaaaggtggcccaaagtgaaatttactcttttctactattataaaaattgaggatgtttttgtcggtactttgatacgtcatttttgtatgaattggtttttaagtttattcgcttttggaaatgcatatctgtatttgagtcgggttttaagttcgtttgcttttgtaaatacagagggatttgtataagaaatatctttagaaaaacccatatgctaatttgacataatttttgagaaaaatatatattcaggcgaattctcacaatgaacaataataagattaaaatagctttcccccgttgcagcgcatgggtattttttctagtaaaaataaaagataaacttagactcaaaacatttacaaaaacaacccctaaagttcctaaagcccaaagtgctatccacgatccatagcaagcccagcccaacccaacccaacccaacccaccccagtccagccaactggacaatagtctccacacccccccactatcaccgtgagttgtccgcacgcaccgcacgtctcgcagccaaaaaaaaaaagaaagaaaaaaaagaaaaagaaaaaacagcaggtgggtccgggtcgtgggggccggaaacgcgaggaggatcgcgagccagcgacgaggccggccctccctccgcttccaaagaaacgccccccatcgccactatatacatacccccccctctcctcccatccccccaaccctaccaccaccaccaccaccacctccacctcctcccccctcgctgccggacgacgagctcctcccccctccccctccgccgccgccgcgccggtaaccaccccgcccctctcctctttctttctccgtttttttttccgtctcggtctcgatctttggccttggtagtttgggtgggcgagaggcggcttcgtgcgcgcccagatcggtgcgcgggaggggcgggatctcgcggctggggctctcgccggcgtggatccggcccggatctcgcggggaatggggctctcggatgtagatctgcgatccgccgttgttgggggagatgatggggggtttaaaatttccgccgtgctaaacaagatcaggaagaggggaaaagggcactatggtttatatttttatatatttctgctgcttcgtcaggcttagatgtgctagatctttctttcttctttttgtgggtagaatttgaatccctcagcattgttcatcggtagtttttcttttcatgatttgtgacaaatgcagcctcgtgcggagcttttttgtaggtagaagtgatcaaccatggcgcaagttagcagaatctgcaatggtgtgcagaacccatctcttatctccaatctctcgaaatccagtcaacgcaaatctcccttatcggtttctctgaagacgcagcagcatccacgagcttatccgatttcgtcgtcgtggggattgaagaagagtgggatgacgttaattggctctgagcttcgtcctcttaaggtcatgtcttctgtttccacggcgtgcatgcttcacggtgcaagcagccggcccgcaaccgcccgcaaatcctctggcctttccggaaccgtccgcattcccggcgacaagtcgatctcccaccggtccttcatgttcggcggtctcgcgagcggtgaaacgcgcatcaccggccttctggaaggcgaggacgtcatcaatacgggcaaggccatgcaggcgatgggcgcccgcatccgtaaggaaggcgacacctggatcatcgatggcgtcggcaatggcggcctcctggcgcctgaggcgccgctcgatttcggcaatgccgccacgggctgccgcctgacgatgggcctcgtcggggtctacgatttcgacagcaccttcatcggcgacgcctcgctcacaaagcgcccgatgggccgcgtgttgaacccgctgcgcgaaatgggcgtgcaggtgaaatcggaagacggtgaccgtcttcccgttaccttgcgcgggccgaagacgccgacgccgatcacctaccgcgtgccgatggcctccgcacaggtgaagtccgccgtgctgctcgccggcctcaacacgcccggcatcacgacggtcatcgagccgatcatgacgcgcgatcatacggaaaagatgctgcagggctttggcgccaaccttaccgtcgagacggatgcggacggcgtgcgcaccatccgcctggaaggccgcggcaagctcaccggccaagtcatcgacgtgccgggcgacccgtcctcgacggccttcccgctggttgcggccctgcttgttccgggctccgacgtcaccatcctcaacgtgctgatgaaccccacccgcaccggcctcatcctgacgctgcaggaaatgggcgccgacatcgaagtcatcaacccgcgccttgccggcggcgaagacgtggcggacctgcgcgttcgctcctccacgctgaagggcgtcacggtgccggaagaccgcgcgccttcgatgatcgacgaatatccgattctcgctgtcgccgccgccttcgcggaaggggcgaccgtgatgaacggtctggaagaactccgcgtcaaggaaagcgaccgcctctcggccgtcgccaatggcctcaagctcaatggcgtggattgcgatgagggcgagacgtcgctcgtcgtgcgtggccgccctgacggcaaggggctcggcaacgcctcgggcgccgccgtcgccacccatctcgatcaccgcatcgccatgagcttcctcgtcatgggcctcgtgtcggaaaaccctgtcacggtggacgatgccacgatgatcgccacgagcttcccggagttcatggacctgatggccgggctgggcgcgaagatcgaactctccgatacgaaggctgcctgatgagctcgaattcccgatcgttcaaacatttggcaataaagtttcttaagattgaatcctgttgccggtcttgcgatgattatcatataatttctgttgaattacgttaagcatgtaataattaacatgtaatgcatgacgttatttatgagatgggtttttatgattagagtcccgcaattatacatttaatacgcgatagaaaacaaaatatagcgcgcaaactaggataaattatcgcgcgcggtgtcatctatgttactagatcggggatgggggatccactagtgatatccgtcgactggtacctacgcgtagctagcccgtgaagtttctcatctaagcccccatttggacgtgaatgtagacacgtcgaaataaagatttccgaattagaataatttgtttattgctttcgcctataaatacgacggatcgtaatttgtcgttttatcaaaatgtactttcattttataataacgctgcggacatctacatttttgaattgaaaaaaaattggtaattactctttctttttctccatattgaccatcatactcattgctgatccatgtagatttcccggacatgaagccatttacaattgaatatatcctgccgccgctgccgctttgcacccggtggagcttgcatgttggtttctacgcagaactgagccggttaggcagataatttccattgagaactgagccatgtgcaccttccccccaacacggtgagcgacggggcaacggagtgatccacatgggacttttcctagcttggctgccatttttggggtgaggccgttcgcggccgaggggcgcagcccctggggggatgggaggcccgcgttagcgggccgggagggttcgagaagggggggcaccccccttcggcgtgcgcggtcacgcgcacagggcgcagccctggttaaaaacaaggtttataaatattggtttaaaagcaggttaaaagacaggttagcggtggccgaaaaacgggcggaaacccttgcaaatgctggattttctgcctgtggacagcccctcaaatgtcaataggtgcgcccctcatctgtcagcactctgcccctcaagtgtcaaggatcgcgcccctcatctgtcagtagtcgcgcccctcaagtgtcaataccgcagggcacttatccccaggcttgtccacatcatctgtgggaaactcgcgtaaaatcaggcgttttcgccgatttgcgaggctggccagctccacgtcgccggccgaaatcgagcctgcccctcatctgtcaacgccgcgccgggtgagtcggcccctcaagtgtcaacgtccgcccctcatctgtcagtgagggccaagttttccgcgaggtatccacaacgccggcggccggccgcggtgtctcgcacacggcttcgacggcgtttctggcgcgtttgcagggccatagacggccgccagcccagcggcgagggcaaccagcccggtgagcgtcggaaagggtcgatcgaccgatgcccttgagagccttcaacccagtcagctccttccggtgggcgcggggcatgactatcgtcgccgcacttatgactgtcttctttatcatgcaactcgtaggacaggtgccggcagcgctctgggtcattttcggcgaggaccgctttcgctggagcgcgacgatgatcggcctgtcgcttgcggtattcggaatcttgcacgccctcgctcaagccttcgtcactggtcccgccaccaaacgtttcggcgagaagcaggccattatcgccggcatggcggccgacgcgctgggctacgtcttgctggcgttcgcgacgcgaggctggatggccttccccattatgattcttctcgcttccggcggcatcgggatgcccgcgttgcaggccatgctgtccaggcaggtagatgacgaccatcagggacagcttcaaggatcgctcgcggctcttaccagcctaacttcgatcattggaccgctgatcgtcacggcgatttatgccgcctcggcgagcacatggaacgggttggcatggattgtaggcgccgccctataccttgtctgcctccccgcgttgcgtcgcggtgcatggagccgggccacctcgacctgaatggaagccggcggcacctcgctaacggattcaccactccaagaattggagccaatcaattcttgcggagaactgtgaatgcgcaaaccaacccttggcagaacatatccatcgcgtccgccatctccagcagccgcacgcggcgcatctcgggcagcgttgggtcctggccacgggtgcgcatgatcgtgctcctgtcgttgaggacccggctaggctggcggggttgccttactggttagcagaatgaatcaccgatacgcgagcgaacgtgaagcgactgctgctgcaaaacgtctgcgacctgagcaacaacatgaatggtcttcggtttccgtgtttcgtaaagtctggaaacgcggaagtcagcgccctgcaccattatgttccggatctgcatcgcaggatgctgctggctaccctgtggaacacctacatctgtattaacgaagcgctggcattgaccctgagtgatttttctctggtcccgccgcatccataccgccagttgtttaccctcacaacgttccagtaaccgggcatgttcatcatcagtaacccgtatcgtgagcatcctctctcgtttcatcggtatcattacccccatgaacagaaatcccccttacacggaggcatcagtgaccaaacaggaaaaaaccgcccttaacatggcccgctttatcagaagccagacattaacgcttctggagaaactcaacgagctggacgcggatgaacaggcagacatctgtgaatcgcttcacgaccacgctgatgagctttaccgcagctgcctcgcgcgtttcggtgatgacggtgaaaacctctgacacatgcagctcccggagacggtcacagcttgtctgtaagcggatgccgggagcagacaagcccgtcagggcgcgtcagcgggtgttggcgggtgtcggggcgcagccatgacccagtcacgtagcgatagcggagtgtatactggcttaactatgcggcatcagagcagattgtactgagagtgcaccatatgcggtgtgaaataccgcacagatgcgtaaggagaaaataccgcatcaggcgctcttccgcttcctcgctcactgactcgctgcgctcggtcgttcggctgcggcgagcggtatcagctcactcaaaggcggtaatacggttatccacagaatcaggggataacgcaggaaagaacatgtgagcaaaaggccagcaaaaggccaggaaccgtaaaaaggccgcgttgctggcgtttttccataggctccgcccccctgacgagcatcacaaaaatcgacgctcaagtcagaggtggcgaaacccgacaggactataaagataccaggcgtttccccctggaagctccctcgtgcgctctcctgttccgaccctgccgcttaccggatacctgtccgcctttctcccttcgggaagcgtggcgctttctcatagctcacgctgtaggtatctcagttcggtgtaggtcgttcgctccaagctgggctgtgtgcacgaaccccccgttcagcccgaccgctgcgccttatccggtaactatcgtcttgagtccaacccggtaagacacgacttatcgccactggcagcagccactggtaacaggattagcagagcgaggtatgtaggcggtgctacagagttcttgaagtggtggcctaactacggctacactagaaggacagtatttggtatctgcgctctgctgaagccagttaccttcggaaaaagagttggtagctcttgatccggcaaacaaaccaccgctggtagcggtggtttttttgtttgcaagcagcagattacgcgcagaaaaaaaggatctcaagaagatcctttgatcttttctacggggtctgacgctcagtggaacgaaaactcacgttaagggattttggtcatgagattatcaaaaaggatcttcacctagatccttttaaattaaaaatgaagttttaaatcaatctaaagtatatatgagtaaacttggtctgacagttaccaatgcttaatcagtgaggcacctatctcagcgatctgtctatttcgttcatccatagttgcctgactccccgtcgtgtagataactacgatacgggagggcttaccatctggccccagtgctgcaatgataccgcgagacccacgctcaccggctccagatttatcagcaataaaccagccagccggaagggccgagcgcagaagtggtcctgcaactttatccgcctccatccagtctattaattgttgccgggaagctagagtaagtagttcgccagttaatagtttgcgcaacgttgttgccattgctgcaggtcgggagcacaggatgacgcctaacaattcattcaagccgacaccgcttcgcggcgcggcttaattcaggagttaaacatcatgagggaagcggtgatcgccgaagtatcgactcaactatcagaggtagttggcgtcatcgagcgccatctcgaaccgacgttgctggccgtacatttgtacggctccgcagtggatggcggcctgaagccacacagtgatattgatttgctggttacggtgaccgtaaggcttgatgaaacaacgcggcgagctttgatcaacgaccttttggaaacttcggcttcccctggagagagcgagattctccgcgctgtagaagtcaccattgttgtgcacgacgacatcattccgtggcgttatccagctaagcgcgaactgcaatttggagaatggcagcgcaatgacattcttgcaggtatcttcgagccagccacgatcgacattgatctggctatcttgctgacaaaagcaagagaacatagcgttgccttggtaggtccagcggcggaggaactctttgatccggttcctgaacaggatctatttgaggcgctaaatgaaaccttaacgctatggaactcgccgcccgactgggctggcgatgagcgaaatgtagtgcttacgttgtcccgcatttggtacagcgcagtaaccggcaaaatcgcgccgaaggatgtcgctgccgactgggcaatggagcgcctgccggcccagtatcagcccgtcatacttgaagctaggcaggcttatcttggacaagaagatcgcttggcctcgcgcgcagatcagttggaagaatttgttcactacgtgaaaggcgagatcaccaaggtagtcggcaaataatgtctaacaattcgttcaagccgacgccgcttcgcggcgcggcttaactcaagcgttagatgctgcaggcatcgtggtgtcacgctcgtcgtttggtatggcttcattcagctccggttcccaacgatcaaggcgagttacatgatcccccatgttgtgcaaaaaagcggttagctccttcggtcctccgatcgaggatttttcggcgctgcgctacgtccgcgaccgcgttgagggatcaagccacagcagcccactcgaccttctagccgacccagacgagccaagggatctttttggaatgctgctccgtcgtcaggctttccgacgtttgggtggttgaacagaagtcattatcgcacggaatgccaagcactcccgaggggaaccctgtggttggcatgcacatacaaatggacgaacggataaaccttttcacgcccttttaaatatccgattattctaataaacgctcttttctcttaggtttacccgccaatatatcctgtcaaacactgatagtttaaactgaaggcgggaaacgacaatctggcgcgcctagctaactagctagccacgtgactcgcagaacgttgtgtggcgagacggaaagaaagtcacgcctccaaagagtgcagcatctcttctggctctcacggtcctctgtggatccatcgatatcgaattcctgcaggctcgaggtcattcatatgcttgagaagagagtcgggatagtccaaaataaaacaaaggtaagattacctggtcaaaagtgaaaacatcagttaaaaggtggtataaagtaaaatatcggtaataaaaggtggcccaaagtgaaatttactcttttctactattataaaaattgaggatgtttttgtcggtactttgatacgtcatttttgtatgaattggtttttaagtttattcgcttttggaaatgcatatctgtatttgagtcgggttttaagttcgtttgcttttgtaaatacagagggatttgtataagaaatatctttagaaaaacccatatgctaatttgacataatttttgagaaaaatatatattcaggcgaattctcacaatgaacaataataagattaaaatagctttcccccgttgcagcgcatgggtattttttctagtaaaaataaaagataaacttagactcaaaacatttacaaaaacaacccctaaagttcctaaagcccaaagtgctatccacgatccatagcaagcccagcccaacccaacccaacccaacccaccccagtccagccaactggacaatagtctccacacccccccactatcaccgtgagttgtccgcacgcaccgcacgtctcgcagccaaaaaaaaaaagaaagaaaaaaaagaaaaagaaaaaacagcaggtgggtccgggtcgtgggggccggaaacgcgaggaggatcgcgagccagcgacgaggagcttaggcctcatcgttgaagatgcctctgccgacagtggtcccaaagatggacccccacccacgaggagcatcgtggaaaaagaagacgttccaaccacgtcttcaaagcaagtggattgatgtgatatctccactgacgtaagggatgacgcacaatcccactatccttcgaggcctcatcgttgaagatgcctctgccgacagtggtcccaaagatggacccccacccacgaggagcatcgtggaaaaagaagacgttccaaccacgtcttcaaagcaagtggattgatgtgatatctccactgacgtaagggatgacgcacaatcccactatccttcgaagctccctccctccgcttccaaagaaacgccccccatcgccactatatacatacccccccctctcctcccatccccccaacccttctagaaccatcttccacacactcaagccacactattggagaacacacagggacaacacaccataagatccaagggaggcctccgccgccgccggtaaccaccccgcccctctcctctttctttctccgtttttttttccgtctcggtctcgatctttggccttggtagtttgggtgggcgagaggcggcttcgtgcgcgcccagatcggtgcgcgggaggggcgggatctcgcggctggggctctcgccggcgtggatccggcccggatctcgcggggaatggggctctcggatgtagatctgcgatccgccgttgttgggggagatgatggggggtttaaaatttccgccgtgctaaacaagatcaggaagaggggaaaagggcactatggtttatatttttatatatttctgctgcttcgtcaggcttagatgtgctagatctttctttcttctttttgtgggtagaatttgaatccctcagcattgttcatcggtagtttttcttttcatgatttgtgacaaatgcagcctcgtgcggagcttttttgtaggtagaaggcggccgcatggcccagtctaagcacgggttgacgaaggagatgactatgaagtatcgcatggaaggctgcgttgacggccacaaattcgtcattaccggcgagggcatcggctacccctttaaggtaagtttctgcttctacctttgatatatatataataattatcattaattagtagtaatataatatttcaaatatttttttcaaaataaaagaatgtagtatatagcaattgcttttctgtagtttataagtgtgtatattttaatttataacttttctaatatatgaccaaaatttgttgatgtgcagggcaagcaagcgataaacctgtgcgtggtggagggtggccctctgcccttcgccgaggatatactctcagccgccttcatgtacgggaatcgggtgttcacggagtacccgcaagacatcgtggactacttcaagaactcctgccccgccggatacacatgggaccgttccttcctcttcgaggacggagccgtttgcatctgcaacgcggacatcaccgtgtccgtcgaggagaactgcatgtaccacgagtcaaagttctatggagtgaacttcccggccgatggtcccgtgatgaagaaaatgacggacaactgggagccgtcgtgcgagaaaatcattcccgtcccaaaacagggaatcctcaagggcgacgtgtcgatgtacctacttctcaaggacggtggacggctacggtgccagttcgacactgtttacaaggcgaagtcggtgccgaggaagatgccggactggcactttatccagcacaagctgacaagggaggacagaagcgacgctaagaaccagaaatggcacctcaccgagcacgccatcgccagtggctctgcgctgcccgggtgaccctgcaatgtgaccctagacttgtccatcttctggattggccaacttaattaatgtatgaaataaaaggatgcacacatagtgacatgctaatcactataatgtgggcatcaaagttgtgtgttatgtgtaattactaattatctgaataagagaaagagatcatccatatttcttatcctaaatgaatgtcacgtgtctttataattctttgatgaaccagatgcattttattaaccaattccatatacatataaatattaatcatatataattaatatcaattgggttagcaaaacaaatctagtctaggtgtgttttgctaattattgggggatagtgcaaaaagaaatctacgttctcaataattcagatagaaaacttaataaagtgagataatttacatagattgcttttatcctttgatatatgtgaaaccatgcatgatataaggaaaatagatagagaaataattttttacatcgttgaatatgtaaacaatttaattcaagaagctaggaatataaatattgaggagtttatgattattattattattttgatgttcaatgaagttttttttaatttcatatgaagtatacaaaaattcttcatagatttttgtttctatgccgtagttatctttaatatatttgtggttgaagaaatttattgctagaaacgaatggattgtcaatttttttttaaagcaaatatatatgaaattatactgtatattattttagtcatgattaaaatgtggccttaattgaatcatctttctcattcattttttcaaaagcatatcaggatgattgatatttatctattttaaaaattaatttaagggttcaaattaaatttaacttaaaagtgtcctaaccgtagttaaaggtttactttaaaaaaatactatgaaaaatctaatcttctatgaatcgagggcccttagctagttaga

SEQ ID NO: 125 - DNA, 10918 bp, synthetic construct
  misc_feature 1..10918: note = pWISE3111 Full Plasmid Sequence
  source 1..10918: mol_type = other DNA
gcccaccggaaggagctgactgggttgaaggctctcaagggcatcggtcgagatcccggtgcctaatgagtgagctaacttacattaattgcgttgcgccccgggatgagattatcaaaaaggatcttcacctagatccttttaaattaaaaatgaagttttaaatcaatctaaagtatatatgtgtaacattggtctagtgattggatccttgacagctagctcagtcctaggtactgtgctagcgctagcaaagaggagaaaggtaccatgcccgatcgagctcaagttatcattcgcattgtgccgggaggtggcaccaagacccttcaacaaattatcaatcagttggagtatctatcccggaagggcaggctggagctgcagcgttcagcccgacatctcgatattcccctgccaccggatcaaatccacgaacttgcccgaagctgggttcaagagactggaacttatgacgaaagtcagccagacgaggaaaggcaacaggagttgaccacccatattattgtaagcttccccgccggtacaagccaggtagcggcttatgcggcgagccgggagtgggcagccgagatgtttgggtcaggcgcaggggggggccgatacaactatcttacggccttccacatcgatcgcgaccacccacatctgcatgtcgtcgtcaatcggcgcgaacttttaggacacggctggctgaagatatctcggcgccatccccaactgaattacgacgccctgcgcataaagatggccgagatttcacttcgtcatggcattgccctcgatgcgagccgacgagcagaacgtggcatcaccgagcggccgatcacttatgcccaatatcggcgccttgagcgggagcaggctcgccaaatccgtttcgaagacgcggatttggaacagtcgtcgccgcaaggagatcatccagaattcagccaacctttcgatacatccccatttgaagcatccgcgggcggaccggaggacatgcctcggcccaacaatcggcagaatgagtcgcaagttcatctccaggagccagctggtgtcagcaacgaagccggtgtccttgtgcgggttgcattggaaacggagcgccttgctcaaccattcgtttccgaaaccattctcgcggacgacatagggagcggctcttcgcgtgttgccgagggccgtgtggagagcgcaaaccgcactcccgatattcctcgcgcagcaactgaagctgccacgcacacgacacacgaccggcagcggcgtgcaaagcgtcctcatgatgacgacggagggccgagtggagcaaaacgtgtgacattggaaggcatcgcggttgggccccaggcgaacgccggcgaacaggatggcagtagtggccccttagtacggcaagctggaacgtcacggccatctccaccgacggccacgacgcgggccagcaccgcaaccgattcattgtctgctacagcccacctccagcaacggagaggtgtcctttcaaagcgtccgcgtgaagatgatgatggagaaccgagtgaacgcaaacgcgagagagatgagcgcagcaaggacgggcgtgggggaaataggagaagcggtggctcctcgggtggcagcatgagcggctccaagaagcgccgcatcaagcaagattcaaagctggagaagttcaccaactgctactcgctgagcaagacgctgcggttcaaggccatccccgtgggcaagacccaggagaacatcgacaacaagcgcctcctggtcgaggacgagaagcgcgccgaggactacaagggcgtcaagaagctcctggaccggtattacctcagcttcatcaacgacgtgctgcactcgatcaagctcaagaacctgaacaactacatcagcctgttccgcaagaaaacgcgcaccgagaaggagaacaaagagctggagaacctggagatcaacctgcggaaggagattgcgaaagctttcaagggcaacgagggctacaagtcgctcttcaagaaagacataatcgagaccatcctgccggagttcctggacgacaaggacgagatcgcgctcgtcaactcgttcaacgggttcactacggccttcacgggtttcttcgataaccgggagaatatgtttagcgaggaggccaagtccacctccattgcgttccgctgcatcaacgagaacctgacccgctacatcagcaacatggacatcttcgagaaggtggacgccatcttcgacaagcacgaggtccaggagatcaaggagaagattctgaactcggactacgacgtggaagacttcttcgagggcgagtttttcaacttcgtcctgacccaggaggggatcgacgtttataacgccatcatcggcgggttcgtcacggagtcgggcgaaaagatcaagggcctgaacgagtatattaacctgtacaaccagaagacaaagcagaagctgccgaagttcaagccgctgtacaagcaagtcctgtccgaccgcgagtcgctgtcgttctacggcgaaggctacacctcggacgaggaggtgctggaggtgttccgcaacaccctgaacaagaatagcgaaatttttagctccattaagaagctcgagaagctgttcaagaacttcgacgagtacagcagcgccgggatcttcgtcaagaacggccccgcgatcagcaccatctcgaaggacatcttcggcgagtggaacgtcatccgggacaagtggaacgccgagtacgacgacattcaccttaaaaagaaggctgttgtgacggagaagtacgaggacgaccggcgcaagtcgttcaaaaagatcggctccttctccctggagcagctccaggagtacgccgacgccgacctctcggtcgtcgagaagctcaaggagatcatcattcagaaggtggacgaaatttacaaagtgtacggctccagcgagaagctgttcgacgccgacttcgtgctggaaaagtcgctcaagaaaaacgacgccgtggtggccatcatgaaggacttgctggacagcgtgaagtcgttcgagaactacattaaggcgttctttggcgagggcaaggagaccaaccgcgacgagtcgttctacggcgacttcgtgctcgcgtacgacatcctgctcaaggtggatcacatctacgacgcgatccgcaactacgtcacgcagaagccgtactcgaaggacaagttcaagctgtacttccagaacccgcagttcatgggcgggtgggacaaggacaaggaaacggactaccgcgcgaccatcctgcggtacggcagcaagtattatctggcgatcatggacaaaaaatatgccaagtgcctccagaaaatcgacaaggacgacgtgaacggcaactacgagaagattaattacaagctgctccccggccccaacaagatgctcccgaaggtgttctttagcaagaagtggatggcctactacaacccgagcgaggacatccagaagatctataagaatggcaccttcaagaagggagacatgtttaacctcaacgactgccacaagctgattgacttcttcaaggactcgatctcgcgctacccgaagtggtcgaacgcctacgacttcaacttcagcgaaacggagaaatacaaagacatcgcgggcttctaccgcgaggtcgaggagcaaggctacaaggtcagcttcgagtccgccagcaagaaggaggtggacaagctggtggaggagggcaagctctacatgtttcagatctacaacaaggattttagcgacaagtcgcacggcacgccgaacctgcacacgatgtacttcaagctgctgttcgacgagaacaaccacggccagatccggctgtcgggcggtgcggagctgttcatgcgccgggcgtcgctcaagaaggaagagctggtcgtccacccggccaacagccccatcgccaacaagaaccccgacaaccccaagaaaacgacgacactcagctatgatgtctataaagacaagcgcttctcggaggaccagtacgagctgcacatccccatcgccatcaacaagtgccccaagaacatcttcaagatcaacacggaggtccgcgtgctcctcaagcacgacgacaacccgtacgtcatcggcatcgaccggggcgagcgcaacctgctgtacatcgtcgtcgtcgatggcaagggcaacatcgtggagcagtattccctgaacgagatcatcaacaacttcaacggcatccgcatcaagaccgactaccactccctcctcgacaagaaggagaaagagcgcttcgaggcccgccagaactggacctccatcgagaacatcaaggagcttaaggcgggctacatctcccaagtcgtccacaagatctgcgagctggtcgagaagtacgacgcggtgatcgccctggaagacctgaactccggcttcaagaactcccgcgtaaaggtggagaagcaagtgtaccagaagttcgagaagatgctgatcgacaagctgaactacatggtggacaagaaatcgaacccgtgcgcgaccggcggcgcgctcaagggctaccagatcacgaacaagttcgagtcgttcaagtccatgagcacgcagaacggctttatcttctacatcccggcctggctgacgtcgaagatcgacccctcgaccggcttcgtgaacctgctcaagaccaagtatactagcattgccgactccaagaaattcatctcgtccttcgaccgcatcatgtacgtcccggaggaggacctttttgagttcgccctcgactacaagaacttcagccgcaccgacgccgactacatcaagaagtggaagctgtactcgtacgggaaccgcatccgtatttttcgcaacccgaagaaaaataatgtcttcgactgggaggaggtgtgcctgaccagcgcctacaaggagctgttcaacaagtacggcatcaactaccaacagggcgacatccgggcccttctctgcgagcagagcgacaaggcgttctactcgtcgttcatggccctgatgagcctgatgctccagatgaggaacagcatcaccggccgcaccgacgtggacttcctcatcagccccgtcaagaactcggacggcatattttatgactcgcggaactacgaggcccaggagaacgccatcctgcccaagaacgccgacgccaacggcgcgtacaacatcgcccgcaaggtgctctgggccatcggccagttcaagaaggcggaagacgagaagctggacaaggtgaagatcgccatctccaacaaggagtggctggagtacgcgcagacgtccgtcaagcacggctccaagaaacggcggatcaaacaagattccggtggcagttccggtggcagcagtgcgtcgttagcaagaggcggtccaaatgcagtgggactcctaacgacgaacgaaagctttgagaaaaatatcaatgaggtctacaaccgtacgcgagccgagctagacgcttcttcacgtgacagaagtcgctctggactatcgcgataatctagaccaggcatcaaataaaacgaaaggctcagtcgaaagactgggcctttcgttttatctgttgtttgtcggtgaacgctctctactagagtcacactggctcaccttcgggtgggcctttctgcgtttatagtacgatatcccaatggcgcgccgagcttggctcgagcatggtcatagctgtttcctgtgtgaaattgttatccgctcacaattccacacaacatacgagccggaagcataaagtgtaaagcctggggtgcctaatgagtgagctaactcacattaattgcgttgcgctcactgcccgctttccagtcgggaaacctgtcgtgccagctgcattaatgaatcggccaacgcgcggggagaggcggtttgcgtattgggcgctgttccgcttcctcgctcactgactcgctgcgctcggtcgttcggctgcggcgagcggtatcagctcactcaaaggcggtaatacggttatccacagaatcaggggataacgcaggaaagaacatgtgagcaaaaggccagcaaaaggccaggaaccgtaaaaaggccgcgttgctggcgtttttccataggctccgcccccctgacgagcatcacaaaaatcgacgctcaagtcagaggtggcgaaacccgacaggactataaagataccaggcgtttccccctggaagctccctcgtgcgctctcctgttccgaccctgccgcttaccggatacctgtccgcctttctcccttcgggaagcgtggcgctttctcatagctcacgctgtaggtatctcagttcggtgtaggtcgttcgctccaagctgggctgtgtgcacgaaccccccgttcagcccgaccgctgcgccttatccggtaactatcgtcttgagtccaacccggtaagacacgacttatcgccactggcagcagccactggtaacaggattagcagagcgaggtatgtaggcggtgctacagagttcttgaagtggtggcctaactacggctacactagaagaacagtatttggtatctgcgctctgctgaagccagttaccttcggaaaaagagttggtagctcttgatccggcaaacaaaccaccgctggtagcggtggtttttttgtttgcaagcagcagattacgcgcagaaaaaaaggatctcaagaagatcctttgatcttttctacggggtctgacgctcagtggaacgaaaactcacgttaagggattttggtcatgagattatcaaaaaggatcttcacctagatccttttaaattaaaaatgaagttttaaatcaatctaaagtatatatgagtaaacttggtctgacagttagaaaaactcatcgagcatcaaatgaaactgcaatttattcatatcaggattatcaataccatatttttgaaaaagccgtttctgtaatgaaggagaaaactcaccgaggcagttccataggatggcaagatcctggtatcggtctgcgattccgactcgtccaacatcaatacaacctattaatttcccctcgtcaaaaataaggttatcaagtgagaaatcaccatgagtgacgactgaatccggtgagaatggcaaaagtttatgcatttctttccagacttgttcaacaggccagccattacgctcgtcatcaaaatcactcgcatcaaccaaaccgttattcattcgtgattgcgcctgagcgaaacgaaatacgcgatcgctgttaaaaggacaattacaaacaggaatcgaatgcaaccggcgcaggaacactgccagcgcatcaacaatattttcacctgaatcaggatattcttctaatacctggaatgctgttttcccagggatcgcagtggtgagtaaccatgcatcatcaggagtacggataaaatgcttgatggtcggaagaggcataaattccgtcagccagtttagtctgaccatctcatctgtaacatcattggcaacgctacctttgccatgtttcagaaacaactctggcgcatcgggcttcccatacaatcgatagattgtcgcacctgattgcccgacattatcgcgagcccatttatacccatataaatcagcatccatgttggaatttaatcgcggcctagagcaagacgtttcccgttgaatatggctcatactcttcctttttcaatattattgaagcatttatcagggttattgtctcatgagcggatacatatttgaatgtatttagaaaaataaacaaataggggttccgcgcacatttccccgaaaagtgccacctgacgtctaagaaaccattattatcatgacattaacctataaaaataggcgtatcacgaggcccttttgtctcgcgcgtttcggtgatgacggtgaaaacctctgacacatgcagctcccggagactgtcacagcttgtctgtaagcggatgccgggagcagacaagcccgtcagggcgcgtcagcgggtgttggcgggtgtcggggctggcttaactatgcggcatcagagcagattgtactgagagtgcaccatatgcggtgtgaaataccgcacagatgcgtaaggagaaaataccgcatcaggcgccattcgccattcaggctgcgcaactgttgggaagggcgatcggtgcgggcctcttcgctattacgccagctggcgaaagggggatgtgctgcaaggcgattaagttgggtaacgccagggttttcccagtcacgacgttgtaaaacgacggccagtgaattgacgcgttgcggctgcatgaaatcctggccggtttgtctgatgccaagctggcggcctggccggccagcttggccgctgaagaaaccgagcgccgccgtctaaaaaggtgatgtgtatttgagtaaaacagcttgcgtcatgcggtcgctgcgtatatgatgcgatgagtaaataaacaaatacgcaaggggaacgcatgaaggttatcgctgtacttaaccagaaaggcgggtcaggcaagacgaccatcgcaacccatctagcccgcgccctgcaactcgccggggccgatgttctgttagtcgattccgatccccagggcagtgcccgcgattgggcggccgtgcgggaagatcaaccgctaaccgttgtcggcatcgaccgcccgacgattgaccgcgacgtgaaggccatcggccggcgcgacttcgtagtgatcgacggagcgccccaggcggcggacttggctgtgtccgcgatcaaggcagccgacttcgtgctgattccggtgcagccaagcccttacgacatatgggccaccgccgacctggtggagctggttaagcagcgcattgaggtcacggatggaaggctacaagcggcctttgtcgtgtcgcgggcgatcaaaggcacgcgcatcggcggtgaggttgccgaggcgctggccgggtacgagctgcccattcttgagtcccgtatcacgcagcgcgtgagctacccaggcactgccgccgccggcacaaccgttcttgaatcagaacccgagggcgacgctgcccgcgaggtccaggcgctggccgctgaaattaaatcaaaactcatttgagttaatgaggtaaagagaaaatgagcaaaagcacaaacacgctaagtgccggccgtccgagcgcacgcagcagcaaggctgcaacgttggccagcctggcagacacgccagccatgaagcgggtcaactttcagttgccggcggaggatcacaccaagctgaagatgtacgcggtacgccaaggcaagaccattaccgagctgctatctgaatacatcgcgcagctaccagagtaaatgagcaaatgaataaatgagtagatgaattttagcggctaaaggaggcggcatggaaaatcaagaacaaccaggcaccgacgccgtggaatgccccatgtgtggaggaacgggcggttggccaggcgtaagcggctgggttgtctgccggccctgcaatggcactggaacccccaagcccgaggaatcggcgtgagcggtcgcaaaccatccggcccggtacaaatcggcgcggcgctgggtgatgacctggtggagaagttgaaggccgcgcaggccgcccagcggcaacgcatcgaggcagaagcacgccccggtgaatcgtggcaagcggccgctgatcgaatccgcaaagaatcccggcaaccgccggcagccggtgcgccgtcgattaggaagccgcccaagggcgacgagcaaccagattttttcgttccgatgctctatgacgtgggcacccgcgatagtcgcagcatcatggacgtggccgttttccgtctgtcgaagcgtgaccgacgagctggcgaggtgatccgctacgagcttccagacgggcacgtagaggtttccgcagggccggccggcatggccagtgtgtgggattacgacctggtactgatggcggtttcccatctaaccgaatccatgaaccgataccgggaagggaagggagacaagcccggccgcgtgttccgtccacacgttgcggacgtactcaagttctgccggcgagccgatggcggaaagcagaaagacgacctggtagaaacctgcattcggttaaacaccacgcacgttgccatgcagcgtacgaagaaggccaagaacggccgcctggtgacggtatccgagggtgaagccttgattagccgctacaagatcgtaaagagcgaaaccgggcggccggagtacatcgagatcgagctagctgattggatgtaccgcgagatcacagaaggcaagaacccggacgtgctgacggttcaccccgattactttttgatcgatcccggcatcggccgttttctctaccgcctggcacgccgcgccgcaggcaaggcagaagccagatggttgttcaagacgatctacgaacgcagtggcagcgccggagagttcaagaagttctgtttcaccgtgcgcaagctgatcgggtcaaatgacctgccggagtacgatttgaaggaggaggcggggcaggctggcccgatcctagtcatgcgctaccgcaacctgatcgagggcgaagcatccgccggttcctaatgtacggagcagatgctagggcaaattgccctagcaggggaaaaaggtcgaaaaggtctctttcctgtggatagcacgtacattgggaacccaaagccgtacattgggaaccggaacccgtacattgggaacccaaagccgtacattgggaaccggtcacacatgtaagtgactgatataaaagagaaaaaaggcgatttttccgcctaaaactctttaaaacttattaaaactcttaaaacccgcctggcctgtgcatatgctagtcatgccccgc

SEQ ID NO: 126 - DNA, 10774 bp, synthetic construct
  source 1..10774: mol_type = other DNA
  misc_feature 1..10774: note = pWISE3118 Full Plasmid Sequence
cggaaggagctgactgggttgaaggctctcaagggcatcggtcgagatcccggtgcctaatgagtgagctaacttacattaattgcgttgcgccccgggatgagattatcaaaaaggatcttcacctagatccttttaaattaaaaatgaagttttaaatcaatctaaagtatatatgtgtaacattggtctagtgattggatccttgacagctagctcagtcctaggtactgtgctagcgctagcaaagaggagaaaggtaccatgcccgatcgagctcaagttatcattcgcattgtgccgggaggtggcaccaagacccttcaacaaattatcaatcagttggagtatctatcccggaagggcaggctggagctgcagcgttcagcccgacatctcgatattcccctgccaccggatcaaatccacgaacttgcccgaagctgggttcaagagactggaacttatgacgaaagtcagccagacgaggaaaggcaacaggagttgaccacccatattattgtaagcttccccgccggtacaagccaggtagcggcttatgcggcgagccgggagtgggcagccgagatgtttgggtcaggcgcaggggggggccgatacaactatcttacggccttccacatcgatcgcgaccacccacatctgcatgtcgtcgtcaatcggcgcgaacttttaggacacggctggctgaagatatctcggcgccatccccaactgaattacgacgccctgcgcataaagatggccgagatttcacttcgtcatggcattgccctcgatgcgagccgacgagcagaacgtggcatcaccgagcggccgatcacttatgcccaatatcggcgccttgagcgggagcaggctcgccaaatccgtttcgaagacgcggatttggaacagtcgtcgccgcaaggagatcatccagaattcagccaacctttcgatacatccccatttgaagcatccgcgggcggaccggaggacatgcctcggcccaacaatcggcagaatgagtcgcaagttcatctccaggagccagctggtgtcagcaacgaagccggtgtccttgtgcgggttgcattggaaacggagcgccttgctcaaccattcgtttccgaaaccattctcgcggacgacatagggagcggctcttcgcgtgttgccgagggccgtgtggagagcgcaaaccgcactcccgatattcctcgcgcagcaactgaagctgccacgcacacgacacacgaccggcagcggcgtgcaaagcgtcctcatgatgacgacggagggccgagtggagcaaaacgtgtgacattggaaggcatcgcggttgggccccaggcgaacgccggcgaacaggatggcagtagtgggggctcctcgggtggcagcatgagcggctccaagaagcgccgcatcaagcaagattcaaagctggagaagttcaccaactgctactcgctgagcaagacgctgcggttcaaggccatccccgtgggcaagacccaggagaacatcgacaacaagcgcctcctggtcgaggacgagaagcgcgccgaggactacaagggcgtcaagaagctcctggaccggtattacctcagcttcatcaacgacgtgctgcactcgatcaagctcaagaacctgaacaactacatcagcctgttccgcaagaaaacgcgcaccgagaaggagaacaaagagctggagaacctggagatcaacctgcggaaggagattgcgaaagctttcaagggcaacgagggctacaagtcgctcttcaagaaagacataatcgagaccatcctgccggagttcctggacgacaaggacgagatcgcgctcgtcaactcgttcaacgggttcactacggccttcacgggtttcttcgataaccgggagaatatgtttagcgaggaggccaagtccacctccattgcgttccgctgcatcaacgagaacctgacccgctacatcagcaacatggacatcttcgagaaggtggacgccatcttcgacaagcacgaggtccaggagatcaaggagaagattctgaactcggactacgacgtggaagacttcttcgagggcgagtttttcaacttcgtcctgacccaggaggggatcgacgtttataacgccatcatcggcgggttcgtcacggagtcgggcgaaaagatcaagggcctgaacgagtatattaacctgtacaaccagaagacaaagcagaagctgccgaagttcaagccgctgtacaagcaagtcctgtccgaccgcgagtcgctgtcgttctacggcgaaggctacacctcggacgaggaggtgctggaggtgttccgcaacaccctgaacaagaatagcgaaatttttagctccattaagaagctcgagaagctgttcaagaacttcgacgagtacagcagcgccgggatcttcgtcaagaacggccccgcgatcagcaccatctcgaaggacatcttcggcgagtggaacgtcatccgggacaagtggaacgccgagtacgacgacattcaccttaaaaagaaggctgttgtgacggagaagtacgaggacgaccggcgcaagtcgttcaaaaagatcggctccttctccctggagcagctccaggagtacgccgacgccgacctctcggtcgtcgagaagctcaaggagatcatcattcagaaggtggacgaaatttacaaagtgtacggctccagcgagaagctgttcgacgccgacttcgtgctggaaaagtcgctcaagaaaaacgacgccgtggtggccatcatgaaggacttgctggacagcgtgaagtcgttcgagaactacattaaggcgttctttggcgagggcaaggagaccaaccgcgacgagtcgttctacggcgacttcgtgctcgcgtacgacatcctgctcaaggtggatcacatctacgacgcgatccgcaactacgtcacgcagaagccgtactcgaaggacaagttcaagctgtacttccagaacccgcagttcatgggcgggtgggacaaggacaaggaaacggactaccgcgcgaccatcctgcggtacggcagcaagtattatctggcgatcatggacaaaaaatatgccaagtgcctccagaaaatcgacaaggacgacgtgaacggcaactacgagaagattaattacaagctgctccccggccccaacaagatgctcccgaaggtgttctttagcaagaagtggatggcctactacaacccgagcgaggacatccagaagatctataagaatggcaccttcaagaagggagacatgtttaacctcaacgactgccacaagctgattgacttcttcaaggactcgatctcgcgctacccgaagtggtcgaacgcctacgacttcaacttcagcgaaacggagaaatacaaagacatcgcgggcttctaccgcgaggtcgaggagcaaggctacaaggtcagcttcgagtccgccagcaagaaggaggtggacaagctggtggaggagggcaagctctacatgtttcagatctacaacaaggattttagcgacaagtcgcacggcacgccgaacctgcacacgatgtacttcaagctgctgttcgacgagaacaaccacggccagatccggctgtcgggcggtgcggagctgttcatgcgccgggcgtcgctcaagaaggaagagctggtcgtccacccggccaacagccccatcgccaacaagaaccccgacaaccccaagaaaacgacgacactcagctatgatgtctataaagacaagcgcttctcggaggaccagtacgagctgcacatccccatcgccatcaacaagtgccccaagaacatcttcaagatcaacacggaggtccgcgtgctcctcaagcacgacgacaacccgtacgtcatcggcatcgaccggggcgagcgcaacctgctgtacatcgtcgtcgtcgatggcaagggcaacatcgtggagcagtattccctgaacgagatcatcaacaacttcaacggcatccgcatcaagaccgactaccactccctcctcgacaagaaggagaaagagcgcttcgaggcccgccagaactggacctccatcgagaacatcaaggagcttaaggcgggctacatctcccaagtcgtccacaagatctgcgagctggtcgagaagtacgacgcggtgatcgccctggaagacctgaactccggcttcaagaactcccgcgtaaaggtggagaagcaagtgtaccagaagttcgagaagatgctgatcgacaagctgaactacatggtggacaagaaatcgaacccgtgcgcgaccggcggcgcgctcaagggctaccagatcacgaacaagttcgagtcgttcaagtccatgagcacgcagaacggctttatcttctacatcccggcctggctgacgtcgaagatcgacccctcgaccggcttcgtgaacctgctcaagaccaagtatactagcattgccgactccaagaaattcatctcgtccttcgaccgcatcatgtacgtcccggaggaggacctttttgagttcgccctcgactacaagaacttcagccgcaccgacgccgactacatcaagaagtggaagctgtactcgtacgggaaccgcatccgtatttttcgcaacccgaagaaaaataatgtcttcgactgggaggaggtgtgcctgaccagcgcctacaaggagctgttcaacaagtacggcatcaactaccaacagggcgacatccgggcccttctctgcgagcagagcgacaaggcgttctactcgtcgttcatggccctgatgagcctgatgctccagatgaggaacagcatcaccggccgcaccgacgtggacttcctcatcagccccgtcaagaactcggacggcatattttatgactcgcggaactacgaggcccaggagaacgccatcctgcccaagaacgccgacgccaacggcgcgtacaacatcgcccgcaaggtgctctgggccatcggccagttcaagaaggcggaagacgagaagctggacaaggtgaagatcgccatctccaacaaggagtggctggagtacgcgcagacgtccgtcaagcacggctccaagaaacggcggatcaaacaagattccggtagtggggggtcctctggtggaagtagtggccccttagtacggcaagctggaacgtcacggccatctccaccgacggccacgacgcgggccagcaccgcaaccgattcattgtctgctacagcccacctccagcaacggagaggtgtcctttcaaagcgtccgcgtgaagatgatgatggagaaccgagtgaacgcaaacgcgagagagatgagcgcagcaaggacgggcgtgggggaaataggagatagtctagaccaggcatcaaataaaacgaaaggctcagtcgaaagactgggcctttcgttttatctgttgtttgtcggtgaacgctctctactagagtcacactggctcaccttcgggtgggcctttctgcgtttatagtacgatatcccaatggcgcgccgagcttggctcgagcatggtcatagctgtttcctgtgtgaaattgttatccgctcacaattccacacaacatacgagccggaagcataaagtgtaaagcctggggtgcctaatgagtgagctaactcacattaattgcgttgcgctcactgcccgctttccagtcgggaaacctgtcgtgccagctgcattaatgaatcggccaacgcgcggggagaggcggtttgcgtattgggcgctgttccgcttcctcgctcactgactcgctgcgctcggtcgttcggctgcggcgagcggtatcagctcactcaaaggcggtaatacggttatccacagaatcaggggataacgcaggaaagaacatgtgagcaaaaggccagcaaaaggccaggaaccgtaaaaaggccgcgttgctggcgtttttccataggctccgcccccctgacgagcatcacaaaaatcgacgctcaagtcagaggtggcgaaacccgacaggactataaagataccaggcgtttccccctggaagctccctcgtgcgctctcctgttccgaccctgccgcttaccggatacctgtccgcctttctcccttcgggaagcgtggcgctttctcatagctcacgctgtaggtatctcagttcggtgtaggtcgttcgctccaagctgggctgtgtgcacgaaccccccgttcagcccgaccgctgcgccttatccggtaactatcgtcttgagtccaacccggtaagacacgacttatcgccactggcagcagccactggtaacaggattagcagagcgaggtatgtaggcggtgctacagagttcttgaagtggtggcctaactacggctacactagaagaacagtatttggtatctgcgctctgctgaagccagttaccttcggaaaaagagttggtagctcttgatccggcaaacaaaccaccgctggtagcggtggtttttttgtttgcaagcagcagattacgcgcagaaaaaaaggatctcaagaagatcctttgatcttttctacggggtctgacgctcagtggaacgaaaactcacgttaagggattttggtcatgagattatcaaaaaggatcttcacctagatccttttaaattaaaaatgaagttttaaatcaatctaaagtatatatgagtaaacttggtctgacagttagaaaaactcatcgagcatcaaatgaaactgcaatttattcatatcaggattatcaataccatatttttgaaaaagccgtttctgtaatgaaggagaaaactcaccgaggcagttccataggatggcaagatcctggtatcggtctgcgattccgactcgtccaacatcaatacaacctattaatttcccctcgtcaaaaataaggttatcaagtgagaaatcaccatgagtgacgactgaatccggtgagaatggcaaaagtttatgcatttctttccagacttgttcaacaggccagccattacgctcgtcatcaaaatcactcgcatcaaccaaaccgttattcattcgtgattgcgcctgagcgaaacgaaatacgcgatcgctgttaaaaggacaattacaaacaggaatcgaatgcaaccggcgcaggaacactgccagcgcatcaacaatattttcacctgaatcaggatattcttctaatacctggaatgctgttttcccagggatcgcagtggtgagtaaccatgcatcatcaggagtacggataaaatgcttgatggtcggaagaggcataaattccgtcagccagtttagtctgaccatctcatctgtaacatcattggcaacgctacctttgccatgtttcagaaacaactctggcgcatcgggcttcccatacaatcgatagattgtcgcacctgattgcccgacattatcgcgagcccatttatacccatataaatcagcatccatgttggaatttaatcgcggcctagagcaagacgtttcccgttgaatatggctcatactcttcctttttcaatattattgaagcatttatcagggttattgtctcatgagcggatacatatttgaatgtatttagaaaaataaacaaataggggttccgcgcacatttccccgaaaagtgccacctgacgtctaagaaaccattattatcatgacattaacctataaaaataggcgtatcacgaggcccttttgtctcgcgcgtttcggtgatgacggtgaaaacctctgacacatgcagctcccggagactgtcacagcttgtctgtaagcggatgccgggagcagacaagcccgtcagggcgcgtcagcgggtgttggcgggtgtcggggctggcttaactatgcggcatcagagcagattgtactgagagtgcaccatatgcggtgtgaaataccgcacagatgcgtaaggagaaaataccgcatcaggcgccattcgccattcaggctgcgcaactgttgggaagggcgatcggtgcgggcctcttcgctattacgccagctggcgaaagggggatgtgctgcaaggcgattaagttgggtaacgccagggttttcccagtcacgacgttgtaaaacgacggccagtgaattgacgcgttgcggctgcatgaaatcctggccggtttgtctgatgccaagctggcggcctggccggccagcttggccgctgaagaaaccgagcgccgccgtctaaaaaggtgatgtgtatttgagtaaaacagcttgcgtcatgcggtcgctgcgtatatgatgcgatgagtaaataaacaaatacgcaaggggaacgcatgaaggttatcgctgtacttaaccagaaaggcgggtcaggcaagacgaccatcgcaacccatctagcccgcgccctgcaactcgccggggccgatgttctgttagtcgattccgatccccagggcagtgcccgcgattgggcggccgtgcgggaagatcaaccgctaaccgttgtcggcatcgaccgcccgacgattgaccgcgacgtgaaggccatcggccggcgcgacttcgtagtgatcgacggagcgccccaggcggcggacttggctgtgtccgcgatcaaggcagccgacttcgtgctgattccggtgcagccaagcccttacgacatatgggccaccgccgacctggtggagctggttaagcagcgcattgaggtcacggatggaaggctacaagcggcctttgtcgtgtcgcgggcgatcaaaggcacgcgcatcggcggtgaggttgccgaggcgctggccgggtacgagctgcccattcttgagtcccgtatcacgcagcgcgtgagctacccaggcactgccgccgccggcacaaccgttcttgaatcagaacccgagggcgacgctgcccgcgaggtccaggcgctggccgctgaaattaaatcaaaactcatttgagttaatgaggtaaagagaaaatgagcaaaagcacaaacacgctaagtgccggccgtccgagcgcacgcagcagcaaggctgcaacgttggccagcctggcagacacgccagccatgaagcgggtcaactttcagttgccggcggaggatcacaccaagctgaagatgtacgcggtacgccaaggcaagaccattaccgagctgctatctgaatacatcgcgcagctaccagagtaaatgagcaaatgaataaatgagtagatgaattttagcggctaaaggaggcggcatggaaaatcaagaacaaccaggcaccgacgccgtggaatgccccatgtgtggaggaacgggcggttggccaggcgtaagcggctgggttgtctgccggccctgcaatggcactggaacccccaagcccgaggaatcggcgtgagcggtcgcaaaccatccggcccggtacaaatcggcgcggcgctgggtgatgacctggtggagaagttgaaggccgcgcaggccgcccagcggcaacgcatcgaggcagaagcacgccccggtgaatcgtggcaagcggccgctgatcgaatccgcaaagaatcccggcaaccgccggcagccggtgcgccgtcgattaggaagccgcccaagggcgacgagcaaccagattttttcgttccgatgctctatgacgtgggcacccgcgatagtcgcagcatcatggacgtggccgttttccgtctgtcgaagcgtgaccgacgagctggcgaggtgatccgctacgagcttccagacgggcacgtagaggtttccgcagggccggccggcatggccagtgtgtgggattacgacctggtactgatggcggtttcccatctaaccgaatccatgaaccgataccgggaagggaagggagacaagcccggccgcgtgttccgtccacacgttgcggacgtactcaagttctgccggcgagccgatggcggaaagcagaaagacgacctggtagaaacctgcattcggttaaacaccacgcacgttgccatgcagcgtacgaagaaggccaagaacggccgcctggtgacggtatccgagggtgaagccttgattagccgctacaagatcgtaaagagcgaaaccgggcggccggagtacatcgagatcgagctagctgattggatgtaccgcgagatcacagaaggcaagaacccggacgtgctgacggttcaccccgattactttttgatcgatcccggcatcggccgttttctctaccgcctggcacgccgcgccgcaggcaaggcagaagccagatggttgttcaagacgatctacgaacgcagtggcagcgccggagagttcaagaagttctgtttcaccgtgcgcaagctgatcgggtcaaatgacctgccggagtacgatttgaaggaggaggcggggcaggctggcccgatcctagtcatgcgctaccgcaacctgatcgagggcgaagcatccgccggttcctaatgtacggagcagatgctagggcaaattgccctagcaggggaaaaaggtcgaaaaggtctctttcctgtggatagcacgtacattgggaacccaaagccgtacattgggaaccggaacccgtacattgggaacccaaagccgtacattgggaaccggtcacacatgtaagtgactgatataaaagagaaaaaaggcgatttttccgcctaaaactctttaaaacttattaaaactcttaaaacccgcctggcctgtgcatatgctagtcatgccccgcgcccac

SEQ ID NO: 127 - DNA, 12424 bp, synthetic construct
  misc_feature 1..12424: note = pWISE2737 Full Plasmid Sequence
  source 1..12424: mol_type = other DNA
agcttactagtcaacaattggccaatctttgttctaaattgctaataaacgaccatttccgtcaattctccttggttgcaacagtctacccgtcaaatgtttactaatttataagtgtgaagtttgaattatgaaagacgaaatcgtattaaaaattcacaagaataaacaactccatagattttcaaaaaaacagtcacgagaaaaaaaccacagtccgtttgtctgctcttctagtttttattatttttctattaatagttttttgttatttcgagaataaaatttgaacgatgtccgaaccacaaaagccgagccgataaatcctaagccgagcctaactttagccgtaaccatcagtcacggctcccgggctaattcatttgaaccgaatcataatcaacggtttagatcaaactcaaaacaatctaacggcaacatagacgcgtcggtgagctaaaaagagtgtgaaagccaggtcaccatagcattgtctctcccagattttttatttgggaaataatagaagaaatagaaaaaaataaaagagtgagaaaaatcgtagagctatatattcgcacatgtactcgtttcgctttccttagtgttagctgctgccgctgttgtttctcctccatttctctatctttctctctcgctgcttctcgaatcttctgtatcatcttcttcttcttcaaggtgagtctctagatccgttcgcttgattttgctgctcgttagtcgttattgttgattctctatgccgatttcgctagatctgtttagcatgcgttgtggttttatgagaaaatctttgttttgggggttgcttgttatgtgattcgatccgtgcttgttggatcgatctgagctaattcttaaggtttatgtgttagatctatggagtttgaggattcttctcgcttctgtcgatctctcgctgttatttttgtttttttcagtgaagtgaagttgtttagttcgaaatgacttcgtgtatgctcgattgatctggttttaatcttcgatctgttaggtgttgatgtttacaagtgaattctagtgttttctcgttgagatctgtgaagtttgaacctagttttctcaataatcaacatatgaagcgatgtttgagtttcaataaacgctgctaatcttcgaaactaagttgtgatctgattcgtgtttacttcatgagcttatccaattcatttcggtttcattttactttttttttagtgaaccatggcgcaagttagcagaatctgcaatggtgtgcagaacccatctcttatctccaatctctcgaaatccagtcaacgcaaatctcccttatcggtttctctgaagacgcagcagcatccacgagcttatccgatttcgtcgtcgtggggattgaagaagagtgggatgacgttaattggctctgagcttcgtcctcttaaggtcatgtcttctgtttccacggcgtgcatgggggaagcggtgatcgccgaagtatcgactcaactatcagaggtagttggcgtcatcgagcgccatctcgaaccgacgttgctggccgtacatttgtacggctccgcagtggatggcggcctgaagccacacagtgatattgatttgctggttacggtgaccgtaaggcttgatgaaacaacgcggcgagctttgatcaacgaccttttggaaacttcggcttcccctggagagagcgagattctccgcgctgtagaagtcaccattgttgtgcacgacgacatcattccgtggcgttatccagctaagcgcgaactgcaatttggagaatggcagcgcaatgacattcttgcaggtatcttcgagccagccacgatcgacattgatctggctatcttgctgacaaaagcaagagaacatagcgttgccttggtaggtccagcggcggaggaactctttgatccggttcctgaacaggatctatttgaggcgctaaatgaaaccttaacgctatggaactcgccgcccgactgggctggcgatgagcgaaatgtagtgcttacgttgtcccgcatttggtacagcgcagtaaccggcaaaatcgcgccgaaggatgtcgctgccgactgggcaatggagcgcctgccggcccagtatcagcccgtcatacttgaagctagacaggcttatcttggacaagaagaagatcgcttggcctcgcgcgcagatcagttggaagaatttgtccactacgtgaaaggcgagatcaccaaggtagtcggcaaataaggatcaattcccgatcgttcaaacatttggcaataaagtttcttaagattgaatcctgttgccggtcttgcgatgattatcatataatttctgttgaattacgttaagcatgtaataattaacatgtaatgcatgacgttatttatgagatgggtttttatgattagagtcccgcaattatacatttaatacgcgatagaaaacaaaatatagcgcgcaaactaggataaattatcgcgcgcggtgtcatctatgttactagatcggtacctacgcgtagctagcccgtgaagtttctcatctaagcccccatttggacgtgaatgtagacacgtcgaaataaagatttccgaattagaataatttgtttattgctttcgcctataaatacgacggatcgtaatttgtcgttttatcaaaatgtactttcattttataataacgctgcggacatctacatttttgaattgaaaaaaaattggtaattactctttctttttctccatattgaccatcatactcattgctgatccatgtagatttcccggacatgaagccatttacaattgaatatatcctgccgccgctgccgctttgcacccggtggagcttgcatgttggtttctacgcagaactgagccggttaggcagataatttccattgagaactgagccatgtgcaccttccccccaacacggtgagcgacggggcaacggagtgatccacatgggacttttcctagcttggctgccatttttggggtgaggccgttcgcggccgaggggcgcagcccctggggggatgggaggcccgcgttagcgggccgggagggttcgagaagggggggcaccccccttcggcgtgcgcggtcacgcgcacagggcgcagccctggttaaaaacaaggtttataaatattggtttaaaagcaggttaaaagacaggttagcggtggccgaaaaacgggcggaaacccttgcaaatgctggattttctgcctgtggacagcccctcaaatgtcaataggtgcgcccctcatctgtcagcactctgcccctcaagtgtcaaggatcgcgcccctcatctgtcagtagtcgcgcccctcaagtgtcaataccgcagggcacttatccccaggcttgtccacatcatctgtgggaaactcgcgtaaaatcaggcgttttcgccgatttgcgaggctggccagctccacgtcgccggccgaaatcgagcctgcccctcatctgtcaacgccgcgccgggtgagtcggcccctcaagtgtcaacgtccgcccctcatctgtcagtgagggccaagttttccgcgaggtatccacaacgccggcggccggccgcggtgtctcgcacacggcttcgacggcgtttctggcgcgtttgcagggccatagacggccgccagcccagcggcgagggcaaccagcccggtgagcgtcggaaagggtcgatcgaccgatgcccttgagagccttcaacccagtcagctccttccggtgggcgcggggcatgactatcgtcgccgcacttatgactgtcttctttatcatgcaactcgtaggacaggtgccggcagcgctctgggtcattttcggcgaggaccgctttcgctggagcgcgacgatgatcggcctgtcgcttgcggtattcggaatcttgcacgccctcgctcaagccttcgtcactggtcccgccaccaaacgtttcggcgagaagcaggccattatcgccggcatggcggccgacgcgctgggctacgtcttgctggcgttcgcgacgcgaggctggatggccttccccattatgattcttctcgcttccggcggcatcgggatgcccgcgttgcaggccatgctgtccaggcaggtagatgacgaccatcagggacagcttcaaggatcgctcgcggctcttaccagcctaacttcgatcattggaccgctgatcgtcacggcgatttatgccgcctcggcgagcacatggaacgggttggcatggattgtaggcgccgccctataccttgtctgcctccccgcgttgcgtcgcggtgcatggagccgggccacctcgacctgaatggaagccggcggcacctcgctaacggattcaccactccaagaattggagccaatcaattcttgcggagaactgtgaatgcgcaaaccaacccttggcagaacatatccatcgcgtccgccatctccagcagccgcacgcggcgcatctcgggcagcgttgggtcctggccacgggtgcgcatgatcgtgctcctgtcgttgaggacccggctaggctggcggggttgccttactggttagcagaatgaatcaccgatacgcgagcgaacgtgaagcgactgctgctgcaaaacgtctgcgacctgagcaacaacatgaatggtcttcggtttccgtgtttcgtaaagtctggaaacgcggaagtcagcgccctgcaccattatgttccggatctgcatcgcaggatgctgctggctaccctgtggaacacctacatctgtattaacgaagcgctggcattgaccctgagtgatttttctctggtcccgccgcatccataccgccagttgtttaccctcacaacgttccagtaaccgggcatgttcatcatcagtaacccgtatcgtgagcatcctctctcgtttcatcggtatcattacccccatgaacagaaatcccccttacacggaggcatcagtgaccaaacaggaaaaaaccgcccttaacatggcccgctttatcagaagccagacattaacgcttctggagaaactcaacgagctggacgcggatgaacaggcagacatctgtgaatcgcttcacgaccacgctgatgagctttaccgcagctgcctcgcgcgtttcggtgatgacggtgaaaacctctgacacatgcagctcccggagacggtcacagcttgtctgtaagcggatgccgggagcagacaagcccgtcagggcgcgtcagcgggtgttggcgggtgtcggggcgcagccatgacccagtcacgtagcgatagcggagtgtatactggcttaactatgcggcatcagagcagattgtactgagagtgcaccatatgcggtgtgaaataccgcacagatgcgtaaggagaaaataccgcatcaggcgctcttccgcttcctcgctcactgactcgctgcgctcggtcgttcggctgcggcgagcggtatcagctcactcaaaggcggtaatacggttatccacagaatcaggggataacgcaggaaagaacatgtgagcaaaaggccagcaaaaggccaggaaccgtaaaaaggccgcgttgctggcgtttttccataggctccgcccccctgacgagcatcacaaaaatcgacgctcaagtcagaggtggcgaaacccgacaggactataaagataccaggcgtttccccctggaagctccctcgtgcgctctcctgttccgaccctgccgcttaccggatacctgtccgcctttctcccttcgggaagcgtggcgctttctcatagctcacgctgtaggtatctcagttcggtgtaggtcgttcgctccaagctgggctgtgtgcacgaaccccccgttcagcccgaccgctgcgccttatccggtaactatcgtcttgagtccaacccggtaagacacgacttatcgccactggcagcagccactggtaacaggattagcagagcgaggtatgtaggcggtgctacagagttcttgaagtggtggcctaactacggctacactagaaggacagtatttggtatctgcgctctgctgaagccagttaccttcggaaaaagagttggtagctcttgatccggcaaacaaaccaccgctggtagcggtggtttttttgtttgcaagcagcagattacgcgcagaaaaaaaggatctcaagaagatcctttgatcttttctacggggtctgacgctcagtggaacgaaaactcacgttaagggattttggtcatgagattatcaaaaaggatcttcacctagatccttttaaattaaaaatgaagttttaaatcaatctaaagtatatatgagtaaacttggtctgacagttaccaatgcttaatcagtgaggcacctatctcagcgatctgtctatttcgttcatccatagttgcctgactccccgtcgtgtagataactacgatacgggagggcttaccatctggccccagtgctgcaatgataccgcgagacccacgctcaccggctccagatttatcagcaataaaccagccagccggaagggccgagcgcagaagtggtcctgcaactttatccgcctccatccagtctattaattgttgccgggaagctagagtaagtagttcgccagttaatagtttgcgcaacgttgttgccattgctgcaggtcgggagcacaggatgacgcctaacaattcattcaagccgacaccgcttcgcggcgcggcttaattcaggagttaaacatcatgagggaagcggtgatcgccgaagtatcgactcaactatcagaggtagttggcgtcatcgagcgccatctcgaaccgacgttgctggccgtacatttgtacggctccgcagtggatggcggcctgaagccacacagtgatattgatttgctggttacggtgaccgtaaggcttgatgaaacaacgcggcgagctttgatcaacgaccttttggaaacttcggcttcccctggagagagcgagattctccgcgctgtagaagtcaccattgttgtgcacgacgacatcattccgtggcgttatccagctaagcgcgaactgcaatttggagaatggcagcgcaatgacattcttgcaggtatcttcgagccagccacgatcgacattgatctggctatcttgctgacaaaagcaagagaacatagcgttgccttggtaggtccagcggcggaggaactctttgatccggttcctgaacaggatctatttgaggcgctaaatgaaaccttaacgctatggaactcgccgcccgactgggctggcgatgagcgaaatgtagtgcttacgttgtcccgcatttggtacagcgcagtaaccggcaaaatcgcgccgaaggatgtcgctgccgactgggcaatggagcgcctgccggcccagtatcagcccgtcatacttgaagctaggcaggcttatcttggacaagaagatcgcttggcctcgcgcgcagatcagttggaagaatttgttcactacgtgaaaggcgagatcaccaaggtagtcggcaaataatgtctaacaattcgttcaagccgacgccgcttcgcggcgcggcttaactcaagcgttagatgctgcaggcatcgtggtgtcacgctcgtcgtttggtatggcttcattcagctccggttcccaacgatcaaggcgagttacatgatcccccatgttgtgcaaaaaagcggttagctccttcggtcctccgatcgaggatttttcggcgctgcgctacgtccgcgaccgcgttgagggatcaagccacagcagcccactcgaccttctagccgacccagacgagccaagggatctttttggaatgctgctccgtcgtcaggctttccgacgtttgggtggttgaacagaagtcattatcgcacggaatgccaagcactcccgaggggaaccctgtggttggcatgcacatacaaatggacgaacggataaaccttttcacgcccttttaaatatccgattattctaataaacgctcttttctcttaggtttacccgccaatatatcctgtcaaacactgatagtttaaactgaaggcgggaaacgacaatctggcgcgcctagctaactagctagccacgtgactcgcagaacgttgtgtggcgagacggaaagaaagtcacgcctccaaagagtgcagcatctcttctggctctcacggtcctctgtggatccatcgatatcgaattcctgcaggctcgaggtcattcatatgcttgagaagagagtcgggatagtccaaaataaaacaaaggtaagattacctggtcaaaagtgaaaacatcagttaaaaggtggtataaagtaaaatatcggtaataaaaggtggcccaaagtgaaatttactcttttctactattataaaaattgaggatgtttttgtcggtactttgatacgtcatttttgtatgaattggtttttaagtttattcgcttttggaaatgcatatctgtatttgagtcgggttttaagttcgtttgcttttgtaaatacagagggatttgtataagaaatatctttagaaaaacccatatgctaatttgacataatttttgagaaaaatatatattcaggcgaattctcacaatgaacaataataagattaaaatagctttcccccgttgcagcgcatgggtattttttctagtaaaaataaaagataaacttagactcaaaacatttacaaaaacaacccctaaagttcctaaagcccaaagtgctatccacgatccatagcaagcccagcccaacccaacccaacccaacccaccccagtccagccaactggacaatagtctccacacccccccactatcaccgtgagttgtccgcacgcaccgcacgtctcgcagccaaaaaaaaaaagaaagaaaaaaaagaaaaagaaaaaacagcaggtgggtccgggtcgtgggggccggaaacgcgaggaggatcgcgagccagcgacgaggagcttaggcctcatcgttgaagatgcctctgccgacagtggtcccaaagatggacccccacccacgaggagcatcgtggaaaaagaagacgttccaaccacgtcttcaaagcaagtggattgatgtgatatctccactgacgtaagggatgacgcacaatcccactatccttcgaggcctcatcgttgaagatgcctctgccgacagtggtcccaaagatggacccccacccacgaggagcatcgtggaaaaagaagacgttccaaccacgtcttcaaagcaagtggattgatgtgatatctccactgacgtaagggatgacgcacaatcccactatccttcgaagctccctccctccgcttccaaagaaacgccccccatcgccactatatacatacccccccctctcctcccatccccccaacccttctagaaccatcttccacacactcaagccacactattggagaacacacagggacaacacaccataagatccaagggaggcctccgccgccgccggtaaccaccccgcccctctcctctttctttctccgtttttttttccgtctcggtctcgatctttggccttggtagtttgggtgggcgagaggcggcttcgtgcgcgcccagatcggtgcgcgggaggggcgggatctcgcggctggggctctcgccggcgtggatccggcccggatctcgcggggaatggggctctcggatgtagatctgcgatccgccgttgttgggggagatgatggggggtttaaaatttccgccgtgctaaacaagatcaggaagaggggaaaagggcactatggtttatatttttatatatttctgctgcttcgtcaggcttagatgtgctagatctttctttcttctttttgtgggtagaatttgaatccctcagcattgttcatcggtagtttttcttttcatgatttgtgacaaatgcagcctcgtgcggagcttttttgtaggtagaaggcggccgcatggcccagtctaagcacgggttgacgaaggagatgactatgaagtatcgcatggaaggctgcgttgacggccacaaattcgtcattaccggcgagggcatcggctacccctttaaggtaagtttctgcttctacctttgatatatatataataattatcattaattagtagtaatataatatttcaaatatttttttcaaaataaaagaatgtagtatatagcaattgcttttctgtagtttataagtgtgtatattttaatttataacttttctaatatatgaccaaaatttgttgatgtgcagggcaagcaagcgataaacctgtgcgtggtggagggtggccctctgcccttcgccgaggatatactctcagccgccttcatgtacgggaatcgggtgttcacggagtacccgcaagacatcgtggactacttcaagaactcctgccccgccggatacacatgggaccgttccttcctcttcgaggacggagccgtttgcatctgcaacgcggacatcaccgtgtccgtcgaggagaactgcatgtaccacgagtcaaagttctatggagtgaacttcccggccgatggtcccgtgatgaagaaaatgacggacaactgggagccgtcgtgcgagaaaatcattcccgtcccaaaacagggaatcctcaagggcgacgtgtcgatgtacctacttctcaaggacggtggacggctacggtgccagttcgacactgtttacaaggcgaagtcggtgccgaggaagatgccggactggcactttatccagcacaagctgacaagggaggacagaagcgacgctaagaaccagaaatggcacctcaccgagcacgccatcgccagtggctctgcgctgcccgggtgaccctgcaatgtgaccctagacttgtccatcttctggattggccaacttaattaatgtatgaaataaaaggatgcacacatagtgacatgctaatcactataatgtgggcatcaaagttgtgtgttatgtgtaattactaattatctgaataagagaaagagatcatccatatttcttatcctaaatgaatgtcacgtgtctttataattctttgatgaaccagatgcattttattaaccaattccatatacatataaatattaatcatatataattaatatcaattgggttagcaaaacaaatctagtctaggtgtgttttgctaattattgggggatagtgcaaaaagaaatctacgttctcaataattcagatagaaaacttaataaagtgagataatttacatagattgcttttatcctttgatatatgtgaaaccatgcatgatataaggaaaatagatagagaaataattttttacatcgttgaatatgtaaacaatttaattcaagaagctaggaatataaatattgaggagtttatgattattattattattttgatgttcaatgaagttttttttaatttcatatgaagtatacaaaaattcttcatagatttttgtttctatgccgtagttatctttaatatatttgtggttgaagaaatttattgctagaaacgaatggattgtcaatttttttttaaagcaaatatatatgaaattatactgtatattattttagtcatgattaaaatgtggccttaattgaatcatctttctcattcattttttcaaaagcatatcaggatgattgatatttatctattttaaaaattaatttaagggttcaaattaaatttaacttaaaagtgtcctaaccgtagttaaaggtttactttaaaaaaatactatgaaaaatctaatcttctatgaatcgagggcccggccgtgacggccacgagcgaactcctgcaggcgataaaaatgttttaaacgatatatattataaaaaaaaacgtttcaaaaataaatacaaaaatgtttttaaatatatataatttaactcattaaagaaaataaaaatgcaagtgcggtgacaagacaagctaaaagttgcaaaagaaatggcagggctataaggctcacctactcctggatttaccaaattttggttcgtccctatactcgaaaaataaaacaaaataaatttcagtatcttcgtttttgtatgctttgactgtgaggcgaggccaactttcttcttctgtctgagatgaattttgtttgcctcctgtgaaggatgtatcattcaaagtgaatgttttgcaactgccagtagtcccacatcgaccaaatattcttattacagtgtgtttatatagcacctggagaaggaatgggttgtttcaaagattaaataatttctactaagtgtagattgccgttaatttgagagtccaagtaatttctactaagtgtagatttttttttgcggccgcacaacaaacgcgccggcga

SEQ ID NO: 128 - DNA, 7198 bp, synthetic construct
  misc_feature 1..7198: note = pWISE3106 Full Plasmid Sequence
  source 1..7198: mol_type = other DNA
cgcccaccggaaggagctgactgggttgaaggctctcaagggcatcggtcgagatcccggtgcctaatgagtgagctaacttacattaattgcgttgcgccccgggatgagattatcaaaaaggatcttcacctagatccttttaaattaaaaatgaagttttaaatcaatctaaagtatatatgtgtaacattggtctagtgattggatccttgacagctagctcagtcctaggtactgtgctagcgctagcaaagaggagaaaggtaccatgagcaattcaacaattaaaatcgcaacaaggaagtacctgggtaaacagaatgtttatgacatcggcgtggagcgtgatcacaatttcgctttgaagaacggttttattgcgagcaactgcttcaactccggtggaagttccggaggttcaagcgggtctgaaacgccgggcaccagcgagtcggcgaccccggaaagcagcggtggttcttccggcggtagcatgcccgatcgagctcaagttatcattcgcattgtgccgggaggtggcaccaagacccttcaacaaattatcaatcagttggagtatctatcccggaagggcaggctggagctgcagcgttcagcccgacatctcgatattcccctgccaccggatcaaatccacgaacttgcccgaagctgggttcaagagactggaacttatgacgaaagtcagccagacgaggaaaggcaacaggagttgaccacccatattattgtaagcttccccgccggtacaagccaggtagcggcttatgcggcgagccgggagtgggcagccgagatgtttgggtcaggcgcaggggggggccgatacaactatcttacggccttccacatcgatcgcgaccacccacatctgcatgtcgtcgtcaatcggcgcgaacttttaggacacggctggctgaagatatctcggcgccatccccaactgaattacgacgccctgcgcataaagatggccgagatttcacttcgtcatggcattgccctcgatgcgagccgacgagcagaacgtggcatcaccgagcggccgatcacttatgcccaatatcggcgccttgagcgggagcaggctcgccaaatccgtttcgaagacgcggatttggaacagtcgtcgccgcaaggagatcatccagaattcagccaacctttcgatacatccccatttgaagcatccgcgggcggaccggaggacatgcctcggcccaacaatcggcagaatgagtcgcaagttcatctccaggagccagctggtgtcagcaacgaagccggtgtccttgtgcgggttgcattggaaacggagcgccttgctcaaccattcgtttccgaaaccattctcgcggacgacatagggagcggctcttcgcgtgttgccgagggccgtgtggagagcgcaaaccgcactcccgatattcctcgcgcagcaactgaagctgccacgcacacgacacacgaccggcagcggcgtgcaaagcgtcctcatgatgacgacggagggccgagtggagcaaaacgtgtgacattggaaggcatcgcggttgggccccaggcgaacgccggcgaacaggatggcagtagtggccccttagtacggcaagctggaacgtcacggccatctccaccgacggccacgacgcgggccagcaccgcaaccgattcattgtctgctacagcccacctccagcaacggagaggtgtcctttcaaagcgtccgcgtgaagatgatgatggagaaccgagtgaacgcaaacgcgagagagatgagcgcagcaaggacgggcgtgggggaaataggagatagtctagaccaggcatcaaataaaacgaaaggctcagtcgaaagactgggcctttcgttttatctgttgtttgtcggtgaacgctctctactagagtcacactggctcaccttcgggtgggcctttctgcgtttatagtacgatatcccaatggcgcgccgagcttggctcgagcatggtcatagctgtttcctgtgtgaaattgttatccgctcacaattccacacaacatacgagccggaagcataaagtgtaaagcctggggtgcctaatgagtgagctaactcacattaattgcgttgcgctcactgcccgctttccagtcgggaaacctgtcgtgccagctgcattaatgaatcggccaacgcgcggggagaggcggtttgcgtattgggcgctgttccgcttcctcgctcactgactcgctgcgctcggtcgttcggctgcggcgagcggtatcagctcactcaaaggcggtaatacggttatccacagaatcaggggataacgcaggaaagaacatgtgagcaaaaggccagcaaaaggccaggaaccgtaaaaaggccgcgttgctggcgtttttccataggctccgcccccctgacgagcatcacaaaaatcgacgctcaagtcagaggtggcgaaacccgacaggactataaagataccaggcgtttccccctggaagctccctcgtgcgctctcctgttccgaccctgccgcttaccggatacctgtccgcctttctcccttcgggaagcgtggcgctttctcatagctcacgctgtaggtatctcagttcggtgtaggtcgttcgctccaagctgggctgtgtgcacgaaccccccgttcagcccgaccgctgcgccttatccggtaactatcgtcttgagtccaacccggtaagacacgacttatcgccactggcagcagccactggtaacaggattagcagagcgaggtatgtaggcggtgctacagagttcttgaagtggtggcctaactacggctacactagaagaacagtatttggtatctgcgctctgctgaagccagttaccttcggaaaaagagttggtagctcttgatccggcaaacaaaccaccgctggtagcggtggtttttttgtttgcaagcagcagattacgcgcagaaaaaaaggatctcaagaagatcctttgatcttttctacggggtctgacgctcagtggaacgaaaactcacgttaagggattttggtcatgagattatcaaaaaggatcttcacctagatccttttaaattaaaaatgaagttttaaatcaatctaaagtatatatgagtaaacttggtctgacagttagaaaaactcatcgagcatcaaatgaaactgcaatttattcatatcaggattatcaataccatatttttgaaaaagccgtttctgtaatgaaggagaaaactcaccgaggcagttccataggatggcaagatcctggtatcggtctgcgattccgactcgtccaacatcaatacaacctattaatttcccctcgtcaaaaataaggttatcaagtgagaaatcaccatgagtgacgactgaatccggtgagaatggcaaaagtttatgcatttctttccagacttgttcaacaggccagccattacgctcgtcatcaaaatcactcgcatcaaccaaaccgttattcattcgtgattgcgcctgagcgaaacgaaatacgcgatcgctgttaaaaggacaattacaaacaggaatcgaatgcaaccggcgcaggaacactgccagcgcatcaacaatattttcacctgaatcaggatattcttctaatacctggaatgctgttttcccagggatcgcagtggtgagtaaccatgcatcatcaggagtacggataaaatgcttgatggtcggaagaggcataaattccgtcagccagtttagtctgaccatctcatctgtaacatcattggcaacgctacctttgccatgtttcagaaacaactctggcgcatcgggcttcccatacaatcgatagattgtcgcacctgattgcccgacattatcgcgagcccatttatacccatataaatcagcatccatgttggaatttaatcgcggcctagagcaagacgtttcccgttgaatatggctcatactcttcctttttcaatattattgaagcatttatcagggttattgtctcatgagcggatacatatttgaatgtatttagaaaaataaacaaataggggttccgcgcacatttccccgaaaagtgccacctgacgtctaagaaaccattattatcatgacattaacctataaaaataggcgtatcacgaggcccttttgtctcgcgcgtttcggtgatgacggtgaaaacctctgacacatgcagctcccggagactgtcacagcttgtctgtaagcggatgccgggagcagacaagcccgtcagggcgcgtcagcgggtgttggcgggtgtcggggctggcttaactatgcggcatcagagcagattgtactgagagtgcaccatatgcggtgtgaaataccgcacagatgcgtaaggagaaaataccgcatcaggcgccattcgccattcaggctgcgcaactgttgggaagggcgatcggtgcgggcctcttcgctattacgccagctggcgaaagggggatgtgctgcaaggcgattaagttgggtaacgccagggttttcccagtcacgacgttgtaaaacgacggccagtgaattgacgcgttgcggctgcatgaaatcctggccggtttgtctgatgccaagctggcggcctggccggccagcttggccgctgaagaaaccgagcgccgccgtctaaaaaggtgatgtgtatttgagtaaaacagcttgcgtcatgcggtcgctgcgtatatgatgcgatgagtaaataaacaaatacgcaaggggaacgcatgaaggttatcgctgtacttaaccagaaaggcgggtcaggcaagacgaccatcgcaacccatctagcccgcgccctgcaactcgccggggccgatgttctgttagtcgattccgatccccagggcagtgcccgcgattgggcggccgtgcgggaagatcaaccgctaaccgttgtcggcatcgaccgcccgacgattgaccgcgacgtgaaggccatcggccggcgcgacttcgtagtgatcgacggagcgccccaggcggcggacttggctgtgtccgcgatcaaggcagccgacttcgtgctgattccggtgcagccaagcccttacgacatatgggccaccgccgacctggtggagctggttaagcagcgcattgaggtcacggatggaaggctacaagcggcctttgtcgtgtcgcgggcgatcaaaggcacgcgcatcggcggtgaggttgccgaggcgctggccgggtacgagctgcccattcttgagtcccgtatcacgcagcgcgtgagctacccaggcactgccgccgccggcacaaccgttcttgaatcagaacccgagggcgacgctgcccgcgaggtccaggcgctggccgctgaaattaaatcaaaactcatttgagttaatgaggtaaagagaaaatgagcaaaagcacaaacacgctaagtgccggccgtccgagcgcacgcagcagcaaggctgcaacgttggccagcctggcagacacgccagccatgaagcgggtcaactttcagttgccggcggaggatcacaccaagctgaagatgtacgcggtacgccaaggcaagaccattaccgagctgctatctgaatacatcgcgcagctaccagagtaaatgagcaaatgaataaatgagtagatgaattttagcggctaaaggaggcggcatggaaaatcaagaacaaccaggcaccgacgccgtggaatgccccatgtgtggaggaacgggcggttggccaggcgtaagcggctgggttgtctgccggccctgcaatggcactggaacccccaagcccgaggaatcggcgtgagcggtcgcaaaccatccggcccggtacaaatcggcgcggcgctgggtgatgacctggtggagaagttgaaggccgcgcaggccgcccagcggcaacgcatcgaggcagaagcacgccccggtgaatcgtggcaagcggccgctgatcgaatccgcaaagaatcccggcaaccgccggcagccggtgcgccgtcgattaggaagccgcccaagggcgacgagcaaccagattttttcgttccgatgctctatgacgtgggcacccgcgatagtcgcagcatcatggacgtggccgttttccgtctgtcgaagcgtgaccgacgagctggcgaggtgatccgctacgagcttccagacgggcacgtagaggtttccgcagggccggccggcatggccagtgtgtgggattacgacctggtactgatggcggtttcccatctaaccgaatccatgaaccgataccgggaagggaagggagacaagcccggccgcgtgttccgtccacacgttgcggacgtactcaagttctgccggcgagccgatggcggaaagcagaaagacgacctggtagaaacctgcattcggttaaacaccacgcacgttgccatgcagcgtacgaagaaggccaagaacggccgcctggtgacggtatccgagggtgaagccttgattagccgctacaagatcgtaaagagcgaaaccgggcggccggagtacatcgagatcgagctagctgattggatgtaccgcgagatcacagaaggcaagaacccggacgtgctgacggttcaccccgattactttttgatcgatcccggcatcggccgttttctctaccgcctggcacgccgcgccgcaggcaaggcagaagccagatggttgttcaagacgatctacgaacgcagtggcagcgccggagagttcaagaagttctgtttcaccgtgcgcaagctgatcgggtcaaatgacctgccggagtacgatttgaaggaggaggcggggcaggctggcccgatcctagtcatgcgctaccgcaacctgatcgagggcgaagcatccgccggttcctaatgtacggagcagatgctagggcaaattgccctagcaggggaaaaaggtcgaaaaggtctctttcctgtggatagcacgtacattgggaacccaaagccgtacattgggaaccggaacccgtacattgggaacccaaagccgtacattgggaaccggtcacacatgtaagtgactgatataaaagagaaaaaaggcgatttttccgcctaaaactctttaaaacttattaaaactcttaaaacccgcctggcctgtgcatatgctagtcatgccccg

SEQ ID NO: 129 - DNA, 8260 bp, synthetic construct
  misc_feature 1..8260: note = pWISE3110 Full Plasmid Sequence
  source 1..8260: mol_type = other DNA
aaggagctgactgggttgaaggctctcaagggcatcggtcgagatcccggtgcctaatgagtgagctaacttacattaattgcgttgcgccccgggatgagattatcaaaaaggatcttcacctagatccttttaaattaaaaatgaagttttaaatcaatctaaagtatatatgtgtaacattggtctagtgattggatccttgacagctagctcagtcctaggtactgtgctagcgctagcaaagaggagaaaggtaccatgcccgatcgagctcaagttatcattcgcattgtgccgggaggtggcaccaagacccttcaacaaattatcaatcagttggagtatctatcccggaagggcaggctggagctgcagcgttcagcccgacatctcgatattcccctgccaccggatcaaatccacgaacttgcccgaagctgggttcaagagactggaacttatgacgaaagtcagccagacgaggaaaggcaacaggagttgaccacccatattattgtaagcttccccgccggtacaagccaggtagcggcttatgcggcgagccgggagtgggcagccgagatgtttgggtcaggcgcaggggggggccgatacaactatcttacggccttccacatcgatcgcgaccacccacatctgcatgtcgtcgtcaatcggcgcgaacttttaggacacggctggctgaagatatctcggcgccatccccaactgaattacgacgccctgcgcataaagatggccgagatttcacttcgtcatggcattgccctcgatgcgagccgacgagcagaacgtggcatcaccgagcggccgatcacttatgcccaatatcggcgccttgagcgggagcaggctcgccaaatccgtttcgaagacgcggatttggaacagtcgtcgccgcaaggagatcatccagaattcagccaacctttcgatacatccccatttgaagcatccgcgggcggaccggaggacatgcctcggcccaacaatcggcagaatgagtcgcaagttcatctccaggagccagctggtgtcagcaacgaagccggtgtccttgtgcgggttgcattggaaacggagcgccttgctcaaccattcgtttccgaaaccattctcgcggacgacatagggagcggctcttcgcgtgttgccgagggccgtgtggagagcgcaaaccgcactcccgatattcctcgcgcagcaactgaagctgccacgcacacgacacacgaccggcagcggcgtgcaaagcgtcctcatgatgacgacggagggccgagtggagcaaaacgtgtgacattggaaggcatcgcggttgggccccaggcgaacgccggcgaacaggatggcagtagtggccccttagtacggcaagctggaacgtcacggccatctccaccgacggccacgacgcgggccagcaccgcaaccgattcattgtctgctacagcccacctccagcaacggagaggtgtcctttcaaagcgtccgcgtgaagatgatgatggagaaccgagtgaacgcaaacgcgagagagatgagcgcagcaaggacgggcgtgggggaaataggagaagcggtggctcctcgggtggcagcatgagcggatcaaagaaaagaaggatcaagcaagatgaggaattgctgagtaaaaactaccatcttgagaacgaagttgcccgtctgaagaagggtagcggttcgggcggtagcggttccggaggtagcggcagcggctcgggtggtagcggttcaggtggctcaggcagtggtgaagaattgctgagcaaaaattatcacctggagaatgaagttgcgcgtctgaagaaaggcagcggctccggtggttctggctcgggcggttcaggtagtggttccggtggctccggcagcggtggttctggctccggtgaagagttgttgtccaagaattatcatctggaaaacgaagtggcaagactcaagaagggttcgggttcgggcggcagcggaagtggtggtagcggaagcggcagcggcggctccggctccggtggctccggcagcggtgaggagctgctgagcaagaactaccacttggagaacgaagtggcacgcctgaagaaaggtagcggtagcggcggttctgggagcggtggctccggaagcggcagcggcggttcgggttctggtggcagcggtagcggcgaagagctgcttagcaaaaattatcaccttgagaacgaggtcgctcgcctgaaaaaaggttccggcagcggcggtagcggtagcggtggcagcggtagcggcagcggtggctcggggtccggtggtagcggctccggtgaagaattgttgtccaaaaactaccacctggagaatgaagtggcgcgtctgaaaaagggtagcggcagcggtggtagcggctctggaggtagcggctccggtagtggcggtagcgggtctggcggctctggttcaggcgaagaactgctcagcaagaattaccatttggagaacgaggttgcgcgcctgaaaaagggctctggtagcggcggttctggctctggtggcagcgggagcggctccggtggcagcggctctggaggttccggttcgggtgaggagctgctgagcaagaactaccacctggaaaacgaggtggcgcgtctgaaaaaaggcagcaagaaacgtcgtatcaaacaggactccggtggcagttccggtggcagcagtgcgtcgttagcaagaggcggtccaaatgcagtgggactcctaacgacgaacgaaagctttgagaaaaatatcaatgaggtctacaaccgtacgcgagccgagctagacgcttcttcacgtgacagaagtcgctctggactatcgcgataatctagaccaggcatcaaataaaacgaaaggctcagtcgaaagactgggcctttcgttttatctgttgtttgtcggtgaacgctctctactagagtcacactggctcaccttcgggtgggcctttctgcgtttatagtacgatatcccaatggcgcgccgagcttggctcgagcatggtcatagctgtttcctgtgtgaaattgttatccgctcacaattccacacaacatacgagccggaagcataaagtgtaaagcctggggtgcctaatgagtgagctaactcacattaattgcgttgcgctcactgcccgctttccagtcgggaaacctgtcgtgccagctgcattaatgaatcggccaacgcgcggggagaggcggtttgcgtattgggcgctgttccgcttcctcgctcactgactcgctgcgctcggtcgttcggctgcggcgagcggtatcagctcactcaaaggcggtaatacggttatccacagaatcaggggataacgcaggaaagaacatgtgagcaaaaggccagcaaaaggccaggaaccgtaaaaaggccgcgttgctggcgtttttccataggctccgcccccctgacgagcatcacaaaaatcgacgctcaagtcagaggtggcgaaacccgacaggactataaagataccaggcgtttccccctggaagctccctcgtgcgctctcctgttccgaccctgccgcttaccggatacctgtccgcctttctcccttcgggaagcgtggcgctttctcatagctcacgctgtaggtatctcagttcggtgtaggtcgttcgctccaagctgggctgtgtgcacgaaccccccgttcagcccgaccgctgcgccttatccggtaactatcgtcttgagtccaacccggtaagacacgacttatcgccactggcagcagccactggtaacaggattagcagagcgaggtatgtaggcggtgctacagagttcttgaagtggtggcctaactacggctacactagaagaacagtatttggtatctgcgctctgctgaagccagttaccttcggaaaaagagttggtagctcttgatccggcaaacaaaccaccgctggtagcggtggtttttttgtttgcaagcagcagattacgcgcagaaaaaaaggatctcaagaagatcctttgatcttttctacggggtctgacgctcagtggaacgaaaactcacgttaagggattttggtcatgagattatcaaaaaggatcttcacctagatccttttaaattaaaaatgaagttttaaatcaatctaaagtatatatgagtaaacttggtctgacagttagaaaaactcatcgagcatcaaatgaaactgcaatttattcatatcaggattatcaataccatatttttgaaaaagccgtttctgtaatgaaggagaaaactcaccgaggcagttccataggatggcaagatcctggtatcggtctgcgattccgactcgtccaacatcaatacaacctattaatttcccctcgtcaaaaataaggttatcaagtgagaaatcaccatgagtgacgactgaatccggtgagaatggcaaaagtttatgcatttctttccagacttgttcaacaggccagccattacgctcgtcatcaaaatcactcgcatcaaccaaaccgttattcattcgtgattgcgcctgagcgaaacgaaatacgcgatcgctgttaaaaggacaattacaaacaggaatcgaatgcaaccggcgcaggaacactgccagcgcatcaacaatattttcacctgaatcaggatattcttctaatacctggaatgctgttttcccagggatcgcagtggtgagtaaccatgcatcatcaggagtacggataaaatgcttgatggtcggaagaggcataaattccgtcagccagtttagtctgaccatctcatctgtaacatcattggcaacgctacctttgccatgtttcagaaacaactctggcgcatcgggcttcccatacaatcgatagattgtcgcacctgattgcccgacattatcgcgagcccatttatacccatataaatcagcatccatgttggaatttaatcgcggcctagagcaagacgtttcccgttgaatatggctcatactcttcctttttcaatattattgaagcatttatcagggttattgtctcatgagcggatacatatttgaatgtatttagaaaaataaacaaataggggttccgcgcacatttccccgaaaagtgccacctgacgtctaagaaaccattattatcatgacattaacctataaaaataggcgtatcacgaggcccttttgtctcgcgcgtttcggtgatgacggtgaaaacctctgacacatgcagctcccggagactgtcacagcttgtctgtaagcggatgccgggagcagacaagcccgtcagggcgcgtcagcgggtgttggcgggtgtcggggctggcttaactatgcggcatcagagcagattgtactgagagtgcaccatatgcggtgtgaaataccgcacagatgcgtaaggagaaaataccgcatcaggcgccattcgccattcaggctgcgcaactgttgggaagggcgatcggtgcgggcctcttcgctattacgccagctggcgaaagggggatgtgctgcaaggcgattaagttgggtaacgccagggttttcccagtcacgacgttgtaaaacgacggccagtgaattgacgcgttgcggctgcatgaaatcctggccggtttgtctgatgccaagctggcggcctggccggccagcttggccgctgaagaaaccgagcgccgccgtctaaaaaggtgatgtgtatttgagtaaaacagcttgcgtcatgcggtcgctgcgtatatgatgcgatgagtaaataaacaaatacgcaaggggaacgcatgaaggttatcgctgtacttaaccagaaaggcgggtcaggcaagacgaccatcgcaacccatctagcccgcgccctgcaactcgccggggccgatgttctgttagtcgattccgatccccagggcagtgcccgcgattgggcggccgtgcgggaagatcaaccgctaaccgttgtcggcatcgaccgcccgacgattgaccgcgacgtgaaggccatcggccggcgcgacttcgtagtgatcgacggagcgccccaggcggcggacttggctgtgtccgcgatcaaggcagccgacttcgtgctgattccggtgcagccaagcccttacgacatatgggccaccgccgacctggtggagctggttaagcagcgcattgaggtcacggatggaaggctacaagcggcctttgtcgtgtcgcgggcgatcaaaggcacgcgcatcggcggtgaggttgccgaggcgctggccgggtacgagctgcccattcttgagtcccgtatcacgcagcgcgtgagctacccaggcactgccgccgccggcacaaccgttcttgaatcagaacccgagggcgacgctgcccgcgaggtccaggcgctggccgctgaaattaaatcaaaactcatttgagttaatgaggtaaagagaaaatgagcaaaagcacaaacacgctaagtgccggccgtccgagcgcacgcagcagcaaggctgcaacgttggccagcctggcagacacgccagccatgaagcgggtcaactttcagttgccggcggaggatcacaccaagctgaagatgtacgcggtacgccaaggcaagaccattaccgagctgctatctgaatacatcgcgcagctaccagagtaaatgagcaaatgaataaatgagtagatgaattttagcggctaaaggaggcggcatggaaaatcaagaacaaccaggcaccgacgccgtggaatgccccatgtgtggaggaacgggcggttggccaggcgtaagcggctgggttgtctgccggccctgcaatggcactggaacccccaagcccgaggaatcggcgtgagcggtcgcaaaccatccggcccggtacaaatcggcgcggcgctgggtgatgacctggtggagaagttgaaggccgcgcaggccgcccagcggcaacgcatcgaggcagaagcacgccccggtgaatcgtggcaagcggccgctgatcgaatccgcaaagaatcccggcaaccgccggcagccggtgcgccgtcgattaggaagccgcccaagggcgacgagcaaccagattttttcgttccgatgctctatgacgtgggcacccgcgatagtcgcagcatcatggacgtggccgttttccgtctgtcgaagcgtgaccgacgagctggcgaggtgatccgctacgagcttccagacgggcacgtagaggtttccgcagggccggccggcatggccagtgtgtgggattacgacctggtactgatggcggtttcccatctaaccgaatccatgaaccgataccgggaagggaagggagacaagcccggccgcgtgttccgtccacacgttgcggacgtactcaagttctgccggcgagccgatggcggaaagcagaaagacgacctggtagaaacctgcattcggttaaacaccacgcacgttgccatgcagcgtacgaagaaggccaagaacggccgcctggtgacggtatccgagggtgaagccttgattagccgctacaagatcgtaaagagcgaaaccgggcggccggagtacatcgagatcgagctagctgattggatgtaccgcgagatcacagaaggcaagaacccggacgtgctgacggttcaccccgattactttttgatcgatcccggcatcggccgttttctctaccgcctggcacgccgcgccgcaggcaaggcagaagccagatggttgttcaagacgatctacgaacgcagtggcagcgccggagagttcaagaagttctgtttcaccgtgcgcaagctgatcgggtcaaatgacctgccggagtacgatttgaaggaggaggcggggcaggctggcccgatcctagtcatgcgctaccgcaacctgatcgagggcgaagcatccgccggttcctaatgtacggagcagatgctagggcaaattgccctagcaggggaaaaaggtcgaaaaggtctctttcctgtggatagcacgtacattgggaacccaaagccgtacattgggaaccggaacccgtacattgggaacccaaagccgtacattgggaaccggtcacacatgtaagtgactgatataaaagagaaaaaaggcgatttttccgcctaaaactctttaaaacttattaaaactcttaaaacccgcctggcctgtgcatatgctagtcatgccccgcgcccaccgg

SEQ ID NO: 130 - DNA, 7519 bp, synthetic construct
  misc_feature 1..7519: note = pWISE3113 Full Plasmid Sequence
  source 1..7519: mol_type = other DNA
cgcgcccaccggaaggagctgactgggttgaaggctctcaagggcatcggtcgagatcccggtgcctaatgagtgagctaacttacattaattgcgttgcgccccgggatgagattatcaaaaaggatcttcacctagatccttttaaattaaaaatgaagttttaaatcaatctaaagtatatatgtgtaacattggtctagtgattggatccttgacagctagctcagtcctaggtactgtgctagcgctagcaaagaggagaaaggtaccatgcccgatcgagctcaagttatcattcgcattgtgccgggaggtggcaccaagacccttcaacaaattatcaatcagttggagtatctatcccggaagggcaggctggagctgcagcgttcagcccgacatctcgatattcccctgccaccggatcaaatccacgaacttgcccgaagctgggttcaagagactggaacttatgacgaaagtcagccagacgaggaaaggcaacaggagttgaccacccatattattgtaagcttccccgccggtacaagccaggtagcggcttatgcggcgagccgggagtgggcagccgagatgtttgggtcaggcgcaggggggggccgatacaactatcttacggccttccacatcgatcgcgaccacccacatctgcatgtcgtcgtcaatcggcgcgaacttttaggacacggctggctgaagatatctcggcgccatccccaactgaattacgacgccctgcgcataaagatggccgagatttcacttcgtcatggcattgccctcgatgcgagccgacgagcagaacgtggcatcaccgagcggccgatcacttatgcccaatatcggcgccttgagcgggagcaggctcgccaaatccgtttcgaagacgcggatttggaacagtcgtcgccgcaaggagatcatccagaattcagccaacctttcgatacatccccatttgaagcatccgcgggcggaccggaggacatgcctcggcccaacaatcggcagaatgagtcgcaagttcatctccaggagccagctggtgtcagcaacgaagccggtgtccttgtgcgggttgcattggaaacggagcgccttgctcaaccattcgtttccgaaaccattctcgcggacgacatagggagcggctcttcgcgtgttgccgagggccgtgtggagagcgcaaaccgcactcccgatattcctcgcgcagcaactgaagctgccacgcacacgacacacgaccggcagcggcgtgcaaagcgtcctcatgatgacgacggagggccgagtggagcaaaacgtgtgacattggaaggcatcgcggttgggccccaggcgaacgccggcgaacaggatggcagtagtggccccttagtacggcaagctggaacgtcacggccatctccaccgacggccacgacgcgggccagcaccgcaaccgattcattgtctgctacagcccacctccagcaacggagaggtgtcctttcaaagcgtccgcgtgaagatgatgatggagaaccgagtgaacgcaaacgcgagagagatgagcgcagcaaggacgggcgtgggggaaataggagaagcggtggctcctcgggtggcagcatgagcggatcaaagaaaagaaggatcaagcaagatggctcttgtctgagctatgaaaccgaaatcctcactgtagagtatggtttgctgccgatcggcaagatcgtggagaaacgtattgagtgcaccgtctactccgtggacaacaacggtaatatttacacccagccggttgctcagtggcacgaccgcggtgaacaagaggttttcgagtactgcttggaagatggtagcctgattcgcgcgaccaaagatcataagtttatgacggtggacggccaaatgctgccgattgatgaaatcttcgaacgtgaactggatctgatgcgtgttgacaacctgccaaattccggtggcagttccggtggcagcagtgcgtcgttagcaagaggcggtccaaatgcagtgggactcctaacgacgaacgaaagctttgagaaaaatatcaatgaggtctacaaccgtacgcgagccgagctagacgcttcttcacgtgacagaagtcgctctggactatcgcgataatctagaccaggcatcaaataaaacgaaaggctcagtcgaaagactgggcctttcgttttatctgttgtttgtcggtgaacgctctctactagagtcacactggctcaccttcgggtgggcctttctgcgtttatagtacgatatcccaatggcgcgccgagcttggctcgagcatggtcatagctgtttcctgtgtgaaattgttatccgctcacaattccacacaacatacgagccggaagcataaagtgtaaagcctggggtgcctaatgagtgagctaactcacattaattgcgttgcgctcactgcccgctttccagtcgggaaacctgtcgtgccagctgcattaatgaatcggccaacgcgcggggagaggcggtttgcgtattgggcgctgttccgcttcctcgctcactgactcgctgcgctcggtcgttcggctgcggcgagcggtatcagctcactcaaaggcggtaatacggttatccacagaatcaggggataacgcaggaaagaacatgtgagcaaaaggccagcaaaaggccaggaaccgtaaaaaggccgcgttgctggcgtttttccataggctccgcccccctgacgagcatcacaaaaatcgacgctcaagtcagaggtggcgaaacccgacaggactataaagataccaggcgtttccccctggaagctccctcgtgcgctctcctgttccgaccctgccgcttaccggatacctgtccgcctttctcccttcgggaagcgtggcgctttctcatagctcacgctgtaggtatctcagttcggtgtaggtcgttcgctccaagctgggctgtgtgcacgaaccccccgttcagcccgaccgctgcgccttatccggtaactatcgtcttgagtccaacccggtaagacacgacttatcgccactggcagcagccactggtaacaggattagcagagcgaggtatgtaggcggtgctacagagttcttgaagtggtggcctaactacggctacactagaagaacagtatttggtatctgcgctctgctgaagccagttaccttcggaaaaagagttggtagctcttgatccggcaaacaaaccaccgctggtagcggtggtttttttgtttgcaagcagcagattacgcgcagaaaaaaaggatctcaagaagatcctttgatcttttctacggggtctgacgctcagtggaacgaaaactcacgttaagggattttggtcatgagattatcaaaaaggatcttcacctagatccttttaaattaaaaatgaagttttaaatcaatctaaagtatatatgagtaaacttggtctgacagttagaaaaactcatcgagcatcaaatgaaactgcaatttattcatatcaggattatcaataccatatttttgaaaaagccgtttctgtaatgaaggagaaaactcaccgaggcagttccataggatggcaagatcctggtatcggtctgcgattccgactcgtccaacatcaatacaacctattaatttcccctcgtcaaaaataaggttatcaagtgagaaatcaccatgagtgacgactgaatccggtgagaatggcaaaagtttatgcatttctttccagacttgttcaacaggccagccattacgctcgtcatcaaaatcactcgcatcaaccaaaccgttattcattcgtgattgcgcctgagcgaaacgaaatacgcgatcgctgttaaaaggacaattacaaacaggaatcgaatgcaaccggcgcaggaacactgccagcgcatcaacaatattttcacctgaatcaggatattcttctaatacctggaatgctgttttcccagggatcgcagtggtgagtaaccatgcatcatcaggagtacggataaaatgcttgatggtcggaagaggcataaattccgtcagccagtttagtctgaccatctcatctgtaacatcattggcaacgctacctttgccatgtttcagaaacaactctggcgcatcgggcttcccatacaatcgatagattgtcgcacctgattgcccgacattatcgcgagcccatttatacccatataaatcagcatccatgttggaatttaatcgcggcctagagcaagacgtttcccgttgaatatggctcatactcttcctttttcaatattattgaagcatttatcagggttattgtctcatgagcggatacatatttgaatgtatttagaaaaataaacaaataggggttccgcgcacatttccccgaaaagtgccacctgacgtctaagaaaccattattatcatgacattaacctataaaaataggcgtatcacgaggcccttttgtctcgcgcgtttcggtgatgacggtgaaaacctctgacacatgcagctcccggagactgtcacagcttgtctgtaagcggatgccgggagcagacaagcccgtcagggcgcgtcagcgggtgttggcgggtgtcggggctggcttaactatgcggcatcagagcagattgtactgagagtgcaccatatgcggtgtgaaataccgcacagatgcgtaaggagaaaataccgcatcaggcgccattcgccattcaggctgcgcaactgttgggaagggcgatcggtgcgggcctcttcgctattacgccagctggcgaaagggggatgtgctgcaaggcgattaagttgggtaacgccagggttttcccagtcacgacgttgtaaaacgacggccagtgaattgacgcgttgcggctgcatgaaatcctggccggtttgtctgatgccaagctggcggcctggccggccagcttggccgctgaagaaaccgagcgccgccgtctaaaaaggtgatgtgtatttgagtaaaacagcttgcgtcatgcggtcgctgcgtatatgatgcgatgagtaaataaacaaatacgcaaggggaacgcatgaaggttatcgctgtacttaaccagaaaggcgggtcaggcaagacgaccatcgcaacccatctagcccgcgccctgcaactcgccggggccgatgttctgttagtcgattccgatccccagggcagtgcccgcgattgggcggccgtgcgggaagatcaaccgctaaccgttgtcggcatcgaccgcccgacgattgaccgcgacgtgaaggccatcggccggcgcgacttcgtagtgatcgacggagcgccccaggcggcggacttggctgtgtccgcgatcaaggcagccgacttcgtgctgattccggtgcagccaagcccttacgacatatgggccaccgccgacctggtggagctggttaagcagcgcattgaggtcacggatggaaggctacaagcggcctttgtcgtgtcgcgggcgatcaaaggcacgcgcatcggcggtgaggttgccgaggcgctggccgggtacgagctgcccattcttgagtcccgtatcacgcagcgcgtgagctacccaggcactgccgccgccggcacaaccgttcttgaatcagaacccgagggcgacgctgcccgcgaggtccaggcgctggccgctgaaattaaatcaaaactcatttgagttaatgaggtaaagagaaaatgagcaaaagcacaaacacgctaagtgccggccgtccgagcgcacgcagcagcaaggctgcaacgttggccagcctggcagacacgccagccatgaagcgggtcaactttcagttgccggcggaggatcacaccaagctgaagatgtacgcggtacgccaaggcaagaccattaccgagctgctatctgaatacatcgcgcagctaccagagtaaatgagcaaatgaataaatgagtagatgaattttagcggctaaaggaggcggcatggaaaatcaagaacaaccaggcaccgacgccgtggaatgccccatgtgtggaggaacgggcggttggccaggcgtaagcggctgggttgtctgccggccctgcaatggcactggaacccccaagcccgaggaatcggcgtgagcggtcgcaaaccatccggcccggtacaaatcggcgcggcgctgggtgatgacctggtggagaagttgaaggccgcgcaggccgcccagcggcaacgcatcgaggcagaagcacgccccggtgaatcgtggcaagcggccgctgatcgaatccgcaaagaatcccggcaaccgccggcagccggtgcgccgtcgattaggaagccgcccaagggcgacgagcaaccagattttttcgttccgatgctctatgacgtgggcacccgcgatagtcgcagcatcatggacgtggccgttttccgtctgtcgaagcgtgaccgacgagctggcgaggtgatccgctacgagcttccagacgggcacgtagaggtttccgcagggccggccggcatggccagtgtgtgggattacgacctggtactgatggcggtttcccatctaaccgaatccatgaaccgataccgggaagggaagggagacaagcccggccgcgtgttccgtccacacgttgcggacgtactcaagttctgccggcgagccgatggcggaaagcagaaagacgacctggtagaaacctgcattcggttaaacaccacgcacgttgccatgcagcgtacgaagaaggccaagaacggccgcctggtgacggtatccgagggtgaagccttgattagccgctacaagatcgtaaagagcgaaaccgggcggccggagtacatcgagatcgagctagctgattggatgtaccgcgagatcacagaaggcaagaacccggacgtgctgacggttcaccccgattactttttgatcgatcccggcatcggccgttttctctaccgcctggcacgccgcgccgcaggcaaggcagaagccagatggttgttcaagacgatctacgaacgcagtggcagcgccggagagttcaagaagttctgtttcaccgtgcgcaagctgatcgggtcaaatgacctgccggagtacgatttgaaggaggaggcggggcaggctggcccgatcctagtcatgcgctaccgcaacctgatcgagggcgaagcatccgccggttcctaatgtacggagcagatgctagggcaaattgccctagcaggggaaaaaggtcgaaaaggtctctttcctgtggatagcacgtacattgggaacccaaagccgtacattgggaaccggaacccgtacattgggaacccaaagccgtacattgggaaccggtcacacatgtaagtgactgatataaaagagaaaaaaggcgatttttccgcctaaaactctttaaaacttattaaaactcttaaaacccgcctggcctgtgcatatgctagtcatgccc

SEQ ID NO: 131 - DNA, 18607 bp, synthetic construct
  misc_feature 1..18607: note = pWISE3094 Full Plasmid Sequence
  source 1..18607: mol_type = other DNA
agcttactagtcaacaattggccaatctttgttctaaattgctaataaacgaccatttccgtcaattctccttggttgcaacagtctacccgtcaaatgtttactaatttataagtgtgaagtttgaattatgaaagacgaaatcgtattaaaaattcacaagaataaacaactccatagattttcaaaaaaacagtcacgagaaaaaaaccacagtccgtttgtctgctcttctagtttttattatttttctattaatagttttttgttatttcgagaataaaatttgaacgatgtccgaaccacaaaagccgagccgataaatcctaagccgagcctaactttagccgtaaccatcagtcacggctcccgggctaattcatttgaaccgaatcataatcaacggtttagatcaaactcaaaacaatctaacggcaacatagacgcgtcggtgagctaaaaagagtgtgaaagccaggtcaccatagcattgtctctcccagattttttatttgggaaataatagaagaaatagaaaaaaataaaagagtgagaaaaatcgtagagctatatattcgcacatgtactcgtttcgctttccttagtgttagctgctgccgctgttgtttctcctccatttctctatctttctctctcgctgcttctcgaatcttctgtatcatcttcttcttcttcaaggtgagtctctagatccgttcgcttgattttgctgctcgttagtcgttattgttgattctctatgccgatttcgctagatctgtttagcatgcgttgtggttttatgagaaaatctttgttttgggggttgcttgttatgtgattcgatccgtgcttgttggatcgatctgagctaattcttaaggtttatgtgttagatctatggagtttgaggattcttctcgcttctgtcgatctctcgctgttatttttgtttttttcagtgaagtgaagttgtttagttcgaaatgacttcgtgtatgctcgattgatctggttttaatcttcgatctgttaggtgttgatgtttacaagtgaattctagtgttttctcgttgagatctgtgaagtttgaacctagttttctcaataatcaacatatgaagcgatgtttgagtttcaataaacgctgctaatcttcgaaactaagttgtgatctgattcgtgtttacttcatgagcttatccaattcatttcggtttcattttactttttttttagtgaaccatggcgcaagttagcagaatctgcaatggtgtgcagaacccatctcttatctccaatctctcgaaatccagtcaacgcaaatctcccttatcggtttctctgaagacgcagcagcatccacgagcttatccgatttcgtcgtcgtggggattgaagaagagtgggatgacgttaattggctctgagcttcgtcctcttaaggtcatgtcttctgtttccacggcgtgcatgggggaagcggtgatcgccgaagtatcgactcaactatcagaggtagttggcgtcatcgagcgccatctcgaaccgacgttgctggccgtacatttgtacggctccgcagtggatggcggcctgaagccacacagtgatattgatttgctggttacggtgaccgtaaggcttgatgaaacaacgcggcgagctttgatcaacgaccttttggaaacttcggcttcccctggagagagcgagattctccgcgctgtagaagtcaccattgttgtgcacgacgacatcattccgtggcgttatccagctaagcgcgaactgcaatttggagaatggcagcgcaatgacattcttgcaggtatcttcgagccagccacgatcgacattgatctggctatcttgctgacaaaagcaagagaacatagcgttgccttggtaggtccagcggcggaggaactctttgatccggttcctgaacaggatctatttgaggcgctaaatgaaaccttaacgctatggaactcgccgcccgactgggctggcgatgagcgaaatgtagtgcttacgttgtcccgcatttggtacagcgcagtaaccggcaaaatcgcgccgaaggatgtcgctgccgactgggcaatggagcgcctgccggcccagtatcagcccgtcatacttgaagctagacaggcttatcttggacaagaagaagatcgcttggcctcgcgcgcagatcagttggaagaatttgtccactacgtgaaaggcgagatcaccaaggtagtcggcaaataaggatcaattcccgatcgttcaaacatttggcaataaagtttcttaagattgaatcctgttgccggtcttgcgatgattatcatataatttctgttgaattacgttaagcatgtaataattaacatgtaatgcatgacgttatttatgagatgggtttttatgattagagtcccgcaattatacatttaatacgcgatagaaaacaaaatatagcgcgcaaactaggataaattatcgcgcgcggtgtcatctatgttactagatcggtacctacgcgtagctagcccgtgaagtttctcatctaagcccccatttggacgtgaatgtagacacgtcgaaataaagatttccgaattagaataatttgtttattgctttcgcctataaatacgacggatcgtaatttgtcgttttatcaaaatgtactttcattttataataacgctgcggacatctacatttttgaattgaaaaaaaattggtaattactctttctttttctccatattgaccatcatactcattgctgatccatgtagatttcccggacatgaagccatttacaattgaatatatcctgccgccgctgccgctttgcacccggtggagcttgcatgttggtttctacgcagaactgagccggttaggcagataatttccattgagaactgagccatgtgcaccttccccccaacacggtgagcgacggggcaacggagtgatccacatgggacttttcctagcttggctgccatttttggggtgaggccgttcgcggccgaggggcgcagcccctggggggatgggaggcccgcgttagcgggccgggagggttcgagaagggggggcaccccccttcggcgtgcgcggtcacgcgcacagggcgcagccctggttaaaaacaaggtttataaatattggtttaaaagcaggttaaaagacaggttagcggtggccgaaaaacgggcggaaacccttgcaaatgctggattttctgcctgtggacagcccctcaaatgtcaataggtgcgcccctcatctgtcagcactctgcccctcaagtgtcaaggatcgcgcccctcatctgtcagtagtcgcgcccctcaagtgtcaataccgcagggcacttatccccaggcttgtccacatcatctgtgggaaactcgcgtaaaatcaggcgttttcgccgatttgcgaggctggccagctccacgtcgccggccgaaatcgagcctgcccctcatctgtcaacgccgcgccgggtgagtcggcccctcaagtgtcaacgtccgcccctcatctgtcagtgagggccaagttttccgcgaggtatccacaacgccggcggccggccgcggtgtctcgcacacggcttcgacggcgtttctggcgcgtttgcagggccatagacggccgccagcccagcggcgagggcaaccagcccggtgagcgtcggaaagggtcgatcgaccgatgcccttgagagccttcaacccagtcagctccttccggtgggcgcggggcatgactatcgtcgccgcacttatgactgtcttctttatcatgcaactcgtaggacaggtgccggcagcgctctgggtcattttcggcgaggaccgctttcgctggagcgcgacgatgatcggcctgtcgcttgcggtattcggaatcttgcacgccctcgctcaagccttcgtcactggtcccgccaccaaacgtttcggcgagaagcaggccattatcgccggcatggcggccgacgcgctgggctacgtcttgctggcgttcgcgacgcgaggctggatggccttccccattatgattcttctcgcttccggcggcatcgggatgcccgcgttgcaggccatgctgtccaggcaggtagatgacgaccatcagggacagcttcaaggatcgctcgcggctcttaccagcctaacttcgatcattggaccgctgatcgtcacggcgatttatgccgcctcggcgagcacatggaacgggttggcatggattgtaggcgccgccctataccttgtctgcctccccgcgttgcgtcgcggtgcatggagccgggccacctcgacctgaatggaagccggcggcacctcgctaacggattcaccactccaagaattggagccaatcaattcttgcggagaactgtgaatgcgcaaaccaacccttggcagaacatatccatcgcgtccgccatctccagcagccgcacgcggcgcatctcgggcagcgttgggtcctggccacgggtgcgcatgatcgtgctcctgtcgttgaggacccggctaggctggcggggttgccttactggttagcagaatgaatcaccgatacgcgagcgaacgtgaagcgactgctgctgcaaaacgtctgcgacctgagcaacaacatgaatggtcttcggtttccgtgtttcgtaaagtctggaaacgcggaagtcagcgccctgcaccattatgttccggatctgcatcgcaggatgctgctggctaccctgtggaacacctacatctgtattaacgaagcgctggcattgaccctgagtgatttttctctggtcccgccgcatccataccgccagttgtttaccctcacaacgttccagtaaccgggcatgttcatcatcagtaacccgtatcgtgagcatcctctctcgtttcatcggtatcattacccccatgaacagaaatcccccttacacggaggcatcagtgaccaaacaggaaaaaaccgcccttaacatggcccgctttatcagaagccagacattaacgcttctggagaaactcaacgagctggacgcggatgaacaggcagacatctgtgaatcgcttcacgaccacgctgatgagctttaccgcagctgcctcgcgcgtttcggtgatgacggtgaaaacctctgacacatgcagctcccggagacggtcacagcttgtctgtaagcggatgccgggagcagacaagcccgtcagggcgcgtcagcgggtgttggcgggtgtcggggcgcagccatgacccagtcacgtagcgatagcggagtgtatactggcttaactatgcggcatcagagcagattgtactgagagtgcaccatatgcggtgtgaaataccgcacagatgcgtaaggagaaaataccgcatcaggcgctcttccgcttcctcgctcactgactcgctgcgctcggtcgttcggctgcggcgagcggtatcagctcactcaaaggcggtaatacggttatccacagaatcaggggataacgcaggaaagaacatgtgagcaaaaggccagcaaaaggccaggaaccgtaaaaaggccgcgttgctggcgtttttccataggctccgcccccctgacgagcatcacaaaaatcgacgctcaagtcagaggtggcgaaacccgacaggactataaagataccaggcgtttccccctggaagctccctcgtgcgctctcctgttccgaccctgccgcttaccggatacctgtccgcctttctcccttcgggaagcgtggcgctttctcatagctcacgctgtaggtatctcagttcggtgtaggtcgttcgctccaagctgggctgtgtgcacgaaccccccgttcagcccgaccgctgcgccttatccggtaactatcgtcttgagtccaacccggtaagacacgacttatcgccactggcagcagccactggtaacaggattagcagagcgaggtatgtaggcggtgctacagagttcttgaagtggtggcctaactacggctacactagaaggacagtatttggtatctgcgctctgctgaagccagttaccttcggaaaaagagttggtagctcttgatccggcaaacaaaccaccgctggtagcggtggtttttttgtttgcaagcagcagattacgcgcagaaaaaaaggatctcaagaagatcctttgatcttttctacggggtctgacgctcagtggaacgaaaactcacgttaagggattttggtcatgagattatcaaaaaggatcttcacctagatccttttaaattaaaaatgaagttttaaatcaatctaaagtatatatgagtaaacttggtctgacagttaccaatgcttaatcagtgaggcacctatctcagcgatctgtctatttcgttcatccatagttgcctgactccccgtcgtgtagataactacgatacgggagggcttaccatctggccccagtgctgcaatgataccgcgagacccacgctcaccggctccagatttatcagcaataaaccagccagccggaagggccgagcgcagaagtggtcctgcaactttatccgcctccatccagtctattaattgttgccgggaagctagagtaagtagttcgccagttaatagtttgcgcaacgttgttgccattgctgcaggtcgggagcacaggatgacgcctaacaattcattcaagccgacaccgcttcgcggcgcggcttaattcaggagttaaacatcatgagggaagcggtgatcgccgaagtatcgactcaactatcagaggtagttggcgtcatcgagcgccatctcgaaccgacgttgctggccgtacatttgtacggctccgcagtggatggcggcctgaagccacacagtgatattgatttgctggttacggtgaccgtaaggcttgatgaaacaacgcggcgagctttgatcaacgaccttttggaaacttcggcttcccctggagagagcgagattctccgcgctgtagaagtcaccattgttgtgcacgacgacatcattccgtggcgttatccagctaagcgcgaactgcaatttggagaatggcagcgcaatgacattcttgcaggtatcttcgagccagccacgatcgacattgatctggctatcttgctgacaaaagcaagagaacatagcgttgccttggtaggtccagcggcggaggaactctttgatccggttcctgaacaggatctatttgaggcgctaaatgaaaccttaacgctatggaactcgccgcccgactgggctggcgatgagcgaaatgtagtgcttacgttgtcccgcatttggtacagcgcagtaaccggcaaaatcgcgccgaaggatgtcgctgccgactgggcaatggagcgcctgccggcccagtatcagcccgtcatacttgaagctaggcaggcttatcttggacaagaagatcgcttggcctcgcgcgcagatcagttggaagaatttgttcactacgtgaaaggcgagatcaccaaggtagtcggcaaataatgtctaacaattcgttcaagccgacgccgcttcgcggcgcggcttaactcaagcgttagatgctgcaggcatcgtggtgtcacgctcgtcgtttggtatggcttcattcagctccggttcccaacgatcaaggcgagttacatgatcccccatgttgtgcaaaaaagcggttagctccttcggtcctccgatcgaggatttttcggcgctgcgctacgtccgcgaccgcgttgagggatcaagccacagcagcccactcgaccttctagccgacccagacgagccaagggatctttttggaatgctgctccgtcgtcaggctttccgacgtttgggtggttgaacagaagtcattatcgcacggaatgccaagcactcccgaggggaaccctgtggttggcatgcacatacaaatggacgaacggataaaccttttcacgcccttttaaatatccgattattctaataaacgctcttttctcttaggtttacccgccaatatatcctgtcaaacactgatagtttaaactgaaggcgggaaacgacaatctggcgcgccactgttaataatttttaaacgtcagcgcactaaaaaaacgaaaagacggacacgtgaaaataaaaaacacacactagtttatgacgcaatactattttacttatgatttgggtacattagacaaaaccgtgaaagagatgtatcagctatgaaacctgtatacttcaatacagagacttactcatatcggatacgtacgcacgaagtatcatattaattattttaatttttaataaatattttatcggatacttatgtgatactctacatatacacaaggatatttctaagatactttatagatacgtatcctagaaaaacatgaagagtaaaaaagtgagacaatgttgtaaaaattcattataaatgtatatgattcaattttagatatgcatcagtataattgattctcgatgaaacacttaaaattatatttcttgtggaagaacgtagcgagagaggtgattcagttagacaacattaaataaaattaatgttaagttcttttaatgatgtttctctcaatatcacatcatatgaaaatgtaatatgatttataagaaaatttttaaaaaatttattttaataatcacatgtactattttttaaaaattgtatcttttataataatacaataataaagagtaatcagtgttaatttttcttcaaatataagttttattataaatcattgttaacgtatcataagtcattaccgtatcgtatcttaatttttttttaaaaaccgctaattcacgtacccgtattgtattgtacccgcacctgtatcacaatcgatcttagttagaagaattgtctcgaggcggtgcaagacagcatataatagacgtggactctcttataccaaacgttgtcgtatcacaaagggttaggtaacaagtcacagtttgtccacgtgtcacgttttaattggaagaggtgccgttggcgtaatataacagccaatcgatttttgctataaaagcaaatcaggtaaactaaacttcttcattcttttcttccccatcgctacaaaaccggttcctttggaaaagagattcattcaaacctagcacccaattccgtttcaaggtataatctactttctattcttcgattattttattattattagctactatcgtttaatcgatcttttcttttgatccgtcaaatttaaattcaattagggttttgttcttttctttcatctgattgaaatccttctgaattgaaccgtttacttgattttactgtttattgtatgatttaatcctttgtttttcaaagacagtctttagattgtgattaggggttcatataaatttttagatttggatttttgtattgtatgattcaaaaaatacgtcctttaattagattagtacatggatattttttacccgatttattgattgtcagggagaatttgatgagcaagtttttttgatgtctgttgtaaattgaattgattataattgctgatctgctgcttccagttttcataacccatattcttttaaccttgttgtacacacaatgaaaaattggtgattgattcatttgtttttctttgttttggattatacagggtatggcgtccaagctggagaagtttacaaactgttacagcctctccaaaaccctcaggtttaaagcgatcccggtgggcaagacccaggagaacatcgacaacaagaggctcctggtggaagacgagaagcgcgccgaagactacaagggcgtgaagaagctgctcgataggtactacctcagctttattaacgacgtgctgcacagcatcaaactcaagaatctcaacaactacatctccctcttccgcaaaaagacccgcaccgagaaggagaacaaggagctggagaacctggagatcaacctccgcaaggaaatcgccaaagcgttcaagggcaatgaagggtacaagagcctcttcaagaaagacatcatcgaaactatcctcccagagtttctcgatgacaaggacgagatcgcgctggtgaactcctttaacgggttcacaaccgcgtttaccggcttctttgataacagggaaaatatgttctccgaggaggccaagtccaccagcatcgccttcaggtgtatcaacgagaacctcacccgctacatttccaatatggacattttcgagaaggtggatgcgatcttcgataagcacgaggtgcaggagatcaaagagaagattctcaattccgattatgacgtcgaggatttcttcgaaggggagttctttaattttgtgctcacacaagagggcattgacgtgtacaacgcgattatcgggggcttcgtcacagagtccggggagaagattaaggggctgaatgagtacatcaatctgtacaatcagaagaccaagcagaaactgccgaaattcaagccgctctacaagcaagtcctgtccgatagggaaagcctctccttctacggcgagggctataccagcgacgaggaggtgctggaagtcttccgcaacacactgaataagaatagcgagattttctcctccatcaagaagctcgagaagctctttaagaactttgacgagtacagctccgccgggattttcgtgaagaacgggccggcgatcagcaccatctccaaggacatctttggcgagtggaacgtcatcagggacaagtggaacgccgagtacgacgacatccacctgaagaagaaggcggtggtgaccgagaagtatgaggacgatcgcaggaagtccttcaaaaaaatcggctccttcagcctcgaacagctccaggagtatgccgatgcggatctgtccgtcgtcgagaagctgaaggaaatcatcattcagaaggtcgacgagatctataaagtgtacgggtccagcgagaagctgttcgacgccgactttgtgctcgagaagtccctcaaaaagaatgacgccgtggtggccattatgaaagacctgctcgactccgtgaagtccttcgaaaattacattaaagcgttctttggggaggggaaggaaactaacagggatgagtccttctatggcgactttgtcctcgcgtacgacatcctgctgaaggtcgaccacatttacgacgcgatccgcaactacgtgacacagaagccgtactccaaagacaagttcaagctgtacttccagaacccgcaatttatggggggctgggacaaggataaagagacagactaccgcgcgacaattctccgctatggctccaaatactatctggccatcatggacaagaagtacgcgaagtgcctgcagaagatcgacaaagacgacgtcaatggcaactatgaaaagatcaactacaagctgctgccgggtccgaacaagatgctcccgaaggtgttcttcagcaagaagtggatggcctactacaatccaagcgaggatattcagaaaatctataaaaacgggaccttcaagaagggggacatgtttaacctcaacgactgccacaagctcattgatttcttcaaggatagcatttcccgctacccgaaatggtccaatgcgtacgattttaacttctccgagacagaaaagtacaaagacatcgcgggcttttacagggaggtggaggagcaagggtataaagtttcttttgaatccgcgagcaagaaggaagtcgacaagctcgtcgaggagggcaagctctacatgttccaaatttataacaaggacttttccgacaagagccatgggaccccaaacctccacaccatgtacttcaaactgctctttgacgagaacaaccacgggcaaatcaggctgagcggcggcgccgaattattcatgcgcagggcctccctcaagaaggaagagctggtcgtccatccagccaattccccgatcgcgaacaagaacccggacaatccgaaaaagaccaccaccctgtcctacgacgtctacaaggacaaacgcttcagcgaagaccagtacgaattacacatcccaattgcgattaataagtgcccaaagaatatcttcaaaattaatacagaggtcagggtgctgctcaaacacgacgacaatccgtatgtcatcggcattgacaggggcgagcgcaatctgctctatatcgtggtcgtggatgggaagggcaatattgtggagcagtactccctgaacgagattatcaacaacttcaatgggattaggattaagaccgactatcacagcctgctcgacaagaaagaaaaagagaggtttgaggcccgccaaaactggacctccattgagaatatcaaagaattaaaggccggctatatttcccaagtcgtccacaagatctgcgagctggtggagaaatatgacgccgtgattgcgctcgaagacttaaattctgggttcaagaactcccgcgtgaaggtggaaaaacaggtgtatcagaaattcgagaaaatgctgatcgacaaactcaattatatggtggataagaagtccaacccgtgtgccacagggggcgcgctgaagggctatcagatcaccaacaagttcgagagcttcaagagcatgagcacccagaacgggtttattttctacatcccggcgtggctcacctccaagattgacccgagcaccggcttcgtgaacctcctgaagacaaagtatacctccattgccgacagcaagaagtttatctcctccttcgaccgcattatgtatgtgccggaggaggacctcttcgagttcgccctcgactacaaaaacttcagccgcacagatgcggattacatcaagaagtggaagctgtactcctacgggaacaggatccgcatcttcaggaatccaaaaaaaaataacgtctttgactgggaggaagtgtgcctgacatccgcctacaaggaactgttcaataaatacggcatcaattaccagcagggcgacattcgcgccctcctctgtgagcagtccgacaaagcgttttactccagcttcatggccctcatgtccctgatgctccaaatgaggaatagcatcacagggcgcaccgacgtcgacttcctcatcagcccggtgaagaactccgacgggatcttttacgactcccgcaactatgaggcgcaagagaatgcgatcctcccgaagaacgccgatgcgaacggggcctataatatcgccaggaaagtgctctgggccatcgggcagttcaaaaaggcggaggatgagaagctcgacaaggtgaaaattgccatttccaacaaggagtggctggagtacgcgcagacctccgtgaagcacggctcctccgagacaccaggcacctccgagagcgcgacgcccgagggcggctccggcggctccggcagctgtttgagttatgaaactgagatcctcaccgttgaatatggtctgttacccattggaaaaattgttgagaagaggattgaatgcacggtctactctgtagacaacaatggaaacatatacactcagcctgtggctcagtggcatgatagaggggagcaagaagtttttgagtattgtcttgaagatggctcactaatccgtgcaacaaaagatcacaagttcatgacagttgatggtcaaatgcttcctattgatgaaatatttgaaagagagcttgatttgatgagggtggacaatttgccaaattgaaagggctctctgtcatgatttcatactttcattattgagctctgtaattacaattatgaccatgagaacatctcttattgtgtggccttttaattgctgatgttagtactgaaccaaagcttatcgtgatgatgtaaaagcaataagtacttgtttgtagcttctttgtgtctccctttgggcttaatacatctgtttagtgttgtggctttggcatagacttctcttggtaataatgccttgcaatgcaaaatttcaattatcaaattctattatgttctcaccttatggtaacagcttaccctgtggaagatgagattcttgagttgagtcattgccaatttttggcattagcttttgaattagtgaattttgacaaaaattaccgtgacactgattttgttgaagctcttaagtgtagtttttacaaaatttcagtggctcgttgtgattatgtcaaactcacggcgaatgtagttcttacagaatttcagtggctccctgcaggatcccaatggcgcgcctagctaactagctagccacgtgactcgcagaacgttgtgtggcgagacggaaagaaagtcacgcctccaaagagtgcagcatctcttctggctctcacggtcctctgtggatccatcgatatcgaattcctgcaggctcgaggtcattcatatgcttgagaagagagtcgggatagtccaaaataaaacaaaggtaagattacctggtcaaaagtgaaaacatcagttaaaaggtggtataaagtaaaatatcggtaataaaaggtggcccaaagtgaaatttactcttttctactattataaaaattgaggatgtttttgtcggtactttgatacgtcatttttgtatgaattggtttttaagtttattcgcttttggaaatgcatatctgtatttgagtcgggttttaagttcgtttgcttttgtaaatacagagggatttgtataagaaatatctttagaaaaacccatatgctaatttgacataatttttgagaaaaatatatattcaggcgaattctcacaatgaacaataataagattaaaatagctttcccccgttgcagcgcatgggtattttttctagtaaaaataaaagataaacttagactcaaaacatttacaaaaacaacccctaaagttcctaaagcccaaagtgctatccacgatccatagcaagcccagcccaacccaacccaacccaacccaccccagtccagccaactggacaatagtctccacacccccccactatcaccgtgagttgtccgcacgcaccgcacgtctcgcagccaaaaaaaaaaagaaagaaaaaaaagaaaaagaaaaaacagcaggtgggtccgggtcgtgggggccggaaacgcgaggaggatcgcgagccagcgacgaggagcttaggcctcatcgttgaagatgcctctgccgacagtggtcccaaagatggacccccacccacgaggagcatcgtggaaaaagaagacgttccaaccacgtcttcaaagcaagtggattgatgtgatatctccactgacgtaagggatgacgcacaatcccactatccttcgaggcctcatcgttgaagatgcctctgccgacagtggtcccaaagatggacccccacccacgaggagcatcgtggaaaaagaagacgttccaaccacgtcttcaaagcaagtggattgatgtgatatctccactgacgtaagggatgacgcacaatcccactatccttcgaagctccctccctccgcttccaaagaaacgccccccatcgccactatatacatacccccccctctcctcccatccccccaacccttctagaaccatcttccacacactcaagccacactattggagaacacacagggacaacacaccataagatccaagggaggcctccgccgccgccggtaaccaccccgcccctctcctctttctttctccgtttttttttccgtctcggtctcgatctttggccttggtagtttgggtgggcgagaggcggcttcgtgcgcgcccagatcggtgcgcgggaggggcgggatctcgcggctggggctctcgccggcgtggatccggcccggatctcgcggggaatggggctctcggatgtagatctgcgatccgccgttgttgggggagatgatggggggtttaaaatttccgccgtgctaaacaagatcaggaagaggggaaaagggcactatggtttatatttttatatatttctgctgcttcgtcaggcttagatgtgctagatctttctttcttctttttgtgggtagaatttgaatccctcagcattgttcatcggtagtttttcttttcatgatttgtgacaaatgcagcctcgtgcggagcttttttgtaggtagaaggcggccgcatggcccagtctaagcacgggttgacgaaggagatgactatgaagtatcgcatggaaggctgcgttgacggccacaaattcgtcattaccggcgagggcatcggctacccctttaaggtaagtttctgcttctacctttgatatatatataataattatcattaattagtagtaatataatatttcaaatatttttttcaaaataaaagaatgtagtatatagcaattgcttttctgtagtttataagtgtgtatattttaatttataacttttctaatatatgaccaaaatttgttgatgtgcagggcaagcaagcgataaacctgtgcgtggtggagggtggccctctgcccttcgccgaggatatactctcagccgccttcatgtacgggaatcgggtgttcacggagtacccgcaagacatcgtggactacttcaagaactcctgccccgccggatacacatgggaccgttccttcctcttcgaggacggagccgtttgcatctgcaacgcggacatcaccgtgtccgtcgaggagaactgcatgtaccacgagtcaaagttctatggagtgaacttcccggccgatggtcccgtgatgaagaaaatgacggacaactgggagccgtcgtgcgagaaaatcattcccgtcccaaaacagggaatcctcaagggcgacgtgtcgatgtacctacttctcaaggacggtggacggctacggtgccagttcgacactgtttacaaggcgaagtcggtgccgaggaagatgccggactggcactttatccagcacaagctgacaagggaggacagaagcgacgctaagaaccagaaatggcacctcaccgagcacgccatcgccagtggctctgcgctgcccgggtgaccctgcaatgtgaccctagacttgtccatcttctggattggccaacttaattaatgtatgaaataaaaggatgcacacatagtgacatgctaatcactataatgtgggcatcaaagttgtgtgttatgtgtaattactaattatctgaataagagaaagagatcatccatatttcttatcctaaatgaatgtcacgtgtctttataattctttgatgaaccagatgcattttattaaccaattccatatacatataaatattaatcatatataattaatatcaattgggttagcaaaacaaatctagtctaggtgtgttttgctaattattgggggatagtgcaaaaagaaatctacgttctcaataattcagatagaaaacttaataaagtgagataatttacatagattgcttttatcctttgatatatgtgaaaccatgcatgatataaggaaaatagatagagaaataattttttacatcgttgaatatgtaaacaatttaattcaagaagctaggaatataaatattgaggagtttatgattattattattattttgatgttcaatgaagttttttttaatttcatatgaagtatacaaaaattcttcatagatttttgtttctatgccgtagttatctttaatatatttgtggttgaagaaatttattgctagaaacgaatggattgtcaatttttttttaaagcaaatatatatgaaattatactgtatattattttagtcatgattaaaatgtggccttaattgaatcatctttctcattcattttttcaaaagcatatcaggatgattgatatttatctattttaaaaattaatttaagggttcaaattaaatttaacttaaaagtgtcctaaccgtagttaaaggtttactttaaaaaaatactatgaaaaatctaatcttctatgaatcgagggcccggccgtgacggccacgagcgaactcctgcaggcgataaaaatgttttaaacgatatatattataaaaaaaaacgtttcaaaaataaatacaaaaatgtttttaaatatatataatttaactcattaaagaaaataaaaatgcaagtgcggtgacaagacaagctaaaagttgcaaaagaaatggcagggctataaggctcacctactcctggatttaccaaattttggttcgtccctatactcgaaaaataaaacaaaataaatttcagtatcttcgtttttgtatgctttgactgtgaggcgaggccaactttcttcttctgtctgagatgaattttgtttgcctcctgtgaaggatgtatcattcaaagtgaatgttttgcaactgccagtagtcccacatcgaccaaatattcttattacagtgtgtttatatagcacctggagaaggaatgggttgtttcaaagattaaataatttctactaagtgtagattgccgttaatttgagagtccaagtaatttctactaagtgtagatttttttttgcggccgcacaacaaacgcgccggcga

SEQ ID NO: 132 - DNA, 18505 bp, synthetic construct
  misc_feature 1..18505: note = pWISE3096 Full Plasmid Sequence
  source 1..18505: mol_type = other DNA
agcttactagtcaacaattggccaatctttgttctaaattgctaataaacgaccatttccgtcaattctccttggttgcaacagtctacccgtcaaatgtttactaatttataagtgtgaagtttgaattatgaaagacgaaatcgtattaaaaattcacaagaataaacaactccatagattttcaaaaaaacagtcacgagaaaaaaaccacagtccgtttgtctgctcttctagtttttattatttttctattaatagttttttgttatttcgagaataaaatttgaacgatgtccgaaccacaaaagccgagccgataaatcctaagccgagcctaactttagccgtaaccatcagtcacggctcccgggctaattcatttgaaccgaatcataatcaacggtttagatcaaactcaaaacaatctaacggcaacatagacgcgtcggtgagctaaaaagagtgtgaaagccaggtcaccatagcattgtctctcccagattttttatttgggaaataatagaagaaatagaaaaaaataaaagagtgagaaaaatcgtagagctatatattcgcacatgtactcgtttcgctttccttagtgttagctgctgccgctgttgtttctcctccatttctctatctttctctctcgctgcttctcgaatcttctgtatcatcttcttcttcttcaaggtgagtctctagatccgttcgcttgattttgctgctcgttagtcgttattgttgattctctatgccgatttcgctagatctgtttagcatgcgttgtggttttatgagaaaatctttgttttgggggttgcttgttatgtgattcgatccgtgcttgttggatcgatctgagctaattcttaaggtttatgtgttagatctatggagtttgaggattcttctcgcttctgtcgatctctcgctgttatttttgtttttttcagtgaagtgaagttgtttagttcgaaatgacttcgtgtatgctcgattgatctggttttaatcttcgatctgttaggtgttgatgtttacaagtgaattctagtgttttctcgttgagatctgtgaagtttgaacctagttttctcaataatcaacatatgaagcgatgtttgagtttcaataaacgctgctaatcttcgaaactaagttgtgatctgattcgtgtttacttcatgagcttatccaattcatttcggtttcattttactttttttttagtgaaccatggcgcaagttagcagaatctgcaatggtgtgcagaacccatctcttatctccaatctctcgaaatccagtcaacgcaaatctcccttatcggtttctctgaagacgcagcagcatccacgagcttatccgatttcgtcgtcgtggggattgaagaagagtgggatgacgttaattggctctgagcttcgtcctcttaaggtcatgtcttctgtttccacggcgtgcatgggggaagcggtgatcgccgaagtatcgactcaactatcagaggtagttggcgtcatcgagcgccatctcgaaccgacgttgctggccgtacatttgtacggctccgcagtggatggcggcctgaagccacacagtgatattgatttgctggttacggtgaccgtaaggcttgatgaaacaacgcggcgagctttgatcaacgaccttttggaaacttcggcttcccctggagagagcgagattctccgcgctgtagaagtcaccattgttgtgcacgacgacatcattccgtggcgttatccagctaagcgcgaactgcaatttggagaatggcagcgcaatgacattcttgcaggtatcttcgagccagccacgatcgacattgatctggctatcttgctgacaaaagcaagagaacatagcgttgccttggtaggtccagcggcggaggaactctttgatccggttcctgaacaggatctatttgaggcgctaaatgaaaccttaacgctatggaactcgccgcccgactgggctggcgatgagcgaaatgtagtgcttacgttgtcccgcatttggtacagcgcagtaaccggcaaaatcgcgccgaaggatgtcgctgccgactgggcaatggagcgcctgccggcccagtatcagcccgtcatacttgaagctagacaggcttatcttggacaagaagaagatcgcttggcctcgcgcgcagatcagttggaagaatttgtccactacgtgaaaggcgagatcaccaaggtagtcggcaaataaggatcaattcccgatcgttcaaacatttggcaataaagtttcttaagattgaatcctgttgccggtcttgcgatgattatcatataatttctgttgaattacgttaagcatgtaataattaacatgtaatgcatgacgttatttatgagatgggtttttatgattagagtcccgcaattatacatttaatacgcgatagaaaacaaaatatagcgcgcaaactaggataaattatcgcgcgcggtgtcatctatgttactagatcggtacctacgcgtagctagcccgtgaagtttctcatctaagcccccatttggacgtgaatgtagacacgtcgaaataaagatttccgaattagaataatttgtttattgctttcgcctataaatacgacggatcgtaatttgtcgttttatcaaaatgtactttcattttataataacgctgcggacatctacatttttgaattgaaaaaaaattggtaattactctttctttttctccatattgaccatcatactcattgctgatccatgtagatttcccggacatgaagccatttacaattgaatatatcctgccgccgctgccgctttgcacccggtggagcttgcatgttggtttctacgcagaactgagccggttaggcagataatttccattgagaactgagccatgtgcaccttccccccaacacggtgagcgacggggcaacggagtgatccacatgggacttttcctagcttggctgccatttttggggtgaggccgttcgcggccgaggggcgcagcccctggggggatgggaggcccgcgttagcgggccgggagggttcgagaagggggggcaccccccttcggcgtgcgcggtcacgcgcacagggcgcagccctggttaaaaacaaggtttataaatattggtttaaaagcaggttaaaagacaggttagcggtggccgaaaaacgggcggaaacccttgcaaatgctggattttctgcctgtggacagcccctcaaatgtcaataggtgcgcccctcatctgtcagcactctgcccctcaagtgtcaaggatcgcgcccctcatctgtcagtagtcgcgcccctcaagtgtcaataccgcagggcacttatccccaggcttgtccacatcatctgtgggaaactcgcgtaaaatcaggcgttttcgccgatttgcgaggctggccagctccacgtcgccggccgaaatcgagcctgcccctcatctgtcaacgccgcgccgggtgagtcggcccctcaagtgtcaacgtccgcccctcatctgtcagtgagggccaagttttccgcgaggtatccacaacgccggcggccggccgcggtgtctcgcacacggcttcgacggcgtttctggcgcgtttgcagggccatagacggccgccagcccagcggcgagggcaaccagcccggtgagcgtcggaaagggtcgatcgaccgatgcccttgagagccttcaacccagtcagctccttccggtgggcgcggggcatgactatcgtcgccgcacttatgactgtcttctttatcatgcaactcgtaggacaggtgccggcagcgctctgggtcattttcggcgaggaccgctttcgctggagcgcgacgatgatcggcctgtcgcttgcggtattcggaatcttgcacgccctcgctcaagccttcgtcactggtcccgccaccaaacgtttcggcgagaagcaggccattatcgccggcatggcggccgacgcgctgggctacgtcttgctggcgttcgcgacgcgaggctggatggccttccccattatgattcttctcgcttccggcggcatcgggatgcccgcgttgcaggccatgctgtccaggcaggtagatgacgaccatcagggacagcttcaaggatcgctcgcggctcttaccagcctaacttcgatcattggaccgctgatcgtcacggcgatttatgccgcctcggcgagcacatggaacgggttggcatggattgtaggcgccgccctataccttgtctgcctccccgcgttgcgtcgcggtgcatggagccgggccacctcgacctgaatggaagccggcggcacctcgctaacggattcaccactccaagaattggagccaatcaattcttgcggagaactgtgaatgcgcaaaccaacccttggcagaacatatccatcgcgtccgccatctccagcagccgcacgcggcgcatctcgggcagcgttgggtcctggccacgggtgcgcatgatcgtgctcctgtcgttgaggacccggctaggctggcggggttgccttactggttagcagaatgaatcaccgatacgcgagcgaacgtgaagcgactgctgctgcaaaacgtctgcgacctgagcaacaacatgaatggtcttcggtttccgtgtttcgtaaagtctggaaacgcggaagtcagcgccctgcaccattatgttccggatctgcatcgcaggatgctgctggctaccctgtggaacacctacatctgtattaacgaagcgctggcattgaccctgagtgatttttctctggtcccgccgcatccataccgccagttgtttaccctcacaacgttccagtaaccgggcatgttcatcatcagtaacccgtatcgtgagcatcctctctcgtttcatcggtatcattacccccatgaacagaaatcccccttacacggaggcatcagtgaccaaacaggaaaaaaccgcccttaacatggcccgctttatcagaagccagacattaacgcttctggagaaactcaacgagctggacgcggatgaacaggcagacatctgtgaatcgcttcacgaccacgctgatgagctttaccgcagctgcctcgcgcgtttcggtgatgacggtgaaaacctctgacacatgcagctcccggagacggtcacagcttgtctgtaagcggatgccgggagcagacaagcccgtcagggcgcgtcagcgggtgttggcgggtgtcggggcgcagccatgacccagtcacgtagcgatagcggagtgtatactggcttaactatgcggcatcagagcagattgtactgagagtgcaccatatgcggtgtgaaataccgcacagatgcgtaaggagaaaataccgcatcaggcgctcttccgcttcctcgctcactgactcgctgcgctcggtcgttcggctgcggcgagcggtatcagctcactcaaaggcggtaatacggttatccacagaatcaggggataacgcaggaaagaacatgtgagcaaaaggccagcaaaaggccaggaaccgtaaaaaggccgcgttgctggcgtttttccataggctccgcccccctgacgagcatcacaaaaatcgacgctcaagtcagaggtggcgaaacccgacaggactataaagataccaggcgtttccccctggaagctccctcgtgcgctctcctgttccgaccctgccgcttaccggatacctgtccgcctttctcccttcgggaagcgtggcgctttctcatagctcacgctgtaggtatctcagttcggtgtaggtcgttcgctccaagctgggctgtgtgcacgaaccccccgttcagcccgaccgctgcgccttatccggtaactatcgtcttgagtccaacccggtaagacacgacttatcgccactggcagcagccactggtaacaggattagcagagcgaggtatgtaggcggtgctacagagttcttgaagtggtggcctaactacggctacactagaaggacagtatttggtatctgcgctctgctgaagccagttaccttcggaaaaagagttggtagctcttgatccggcaaacaaaccaccgctggtagcggtggtttttttgtttgcaagcagcagattacgcgcagaaaaaaaggatctcaagaagatcctttgatcttttctacggggtctgacgctcagtggaacgaaaactcacgttaagggattttggtcatgagattatcaaaaaggatcttcacctagatccttttaaattaaaaatgaagttttaaatcaatctaaagtatatatgagtaaacttggtctgacagttaccaatgcttaatcagtgaggcacctatctcagcgatctgtctatttcgttcatccatagttgcctgactccccgtcgtgtagataactacgatacgggagggcttaccatctggccccagtgctgcaatgataccgcgagacccacgctcaccggctccagatttatcagcaataaaccagccagccggaagggccgagcgcagaagtggtcctgcaactttatccgcctccatccagtctattaattgttgccgggaagctagagtaagtagttcgccagttaatagtttgcgcaacgttgttgccattgctgcaggtcgggagcacaggatgacgcctaacaattcattcaagccgacaccgcttcgcggcgcggcttaattcaggagttaaacatcatgagggaagcggtgatcgccgaagtatcgactcaactatcagaggtagttggcgtcatcgagcgccatctcgaaccgacgttgctggccgtacatttgtacggctccgcagtggatggcggcctgaagccacacagtgatattgatttgctggttacggtgaccgtaaggcttgatgaaacaacgcggcgagctttgatcaacgaccttttggaaacttcggcttcccctggagagagcgagattctccgcgctgtagaagtcaccattgttgtgcacgacgacatcattccgtggcgttatccagctaagcgcgaactgcaatttggagaatggcagcgcaatgacattcttgcaggtatcttcgagccagccacgatcgacattgatctggctatcttgctgacaaaagcaagagaacatagcgttgccttggtaggtccagcggcggaggaactctttgatccggttcctgaacaggatctatttgaggcgctaaatgaaaccttaacgctatggaactcgccgcccgactgggctggcgatgagcgaaatgtagtgcttacgttgtcccgcatttggtacagcgcagtaaccggcaaaatcgcgccgaaggatgtcgctgccgactgggcaatggagcgcctgccggcccagtatcagcccgtcatacttgaagctaggcaggcttatcttggacaagaagatcgcttggcctcgcgcgcagatcagttggaagaatttgttcactacgtgaaaggcgagatcaccaaggtagtcggcaaataatgtctaacaattcgttcaagccgacgccgcttcgcggcgcggcttaactcaagcgttagatgctgcaggcatcgtggtgtcacgctcgtcgtttggtatggcttcattcagctccggttcccaacgatcaaggcgagttacatgatcccccatgttgtgcaaaaaagcggttagctccttcggtcctccgatcgaggatttttcggcgctgcgctacgtccgcgaccgcgttgagggatcaagccacagcagcccactcgaccttctagccgacccagacgagccaagggatctttttggaatgctgctccgtcgtcaggctttccgacgtttgggtggttgaacagaagtcattatcgcacggaatgccaagcactcccgaggggaaccctgtggttggcatgcacatacaaatggacgaacggataaaccttttcacgcccttttaaatatccgattattctaataaacgctcttttctcttaggtttacccgccaatatatcctgtcaaacactgatagtttaaactgaaggcgggaaacgacaatctggcgcgccactgttaataatttttaaacgtcagcgcactaaaaaaacgaaaagacggacacgtgaaaataaaaaacacacactagtttatgacgcaatactattttacttatgatttgggtacattagacaaaaccgtgaaagagatgtatcagctatgaaacctgtatacttcaatacagagacttactcatatcggatacgtacgcacgaagtatcatattaattattttaatttttaataaatattttatcggatacttatgtgatactctacatatacacaaggatatttctaagatactttatagatacgtatcctagaaaaacatgaagagtaaaaaagtgagacaatgttgtaaaaattcattataaatgtatatgattcaattttagatatgcatcagtataattgattctcgatgaaacacttaaaattatatttcttgtggaagaacgtagcgagagaggtgattcagttagacaacattaaataaaattaatgttaagttcttttaatgatgtttctctcaatatcacatcatatgaaaatgtaatatgatttataagaaaatttttaaaaaatttattttaataatcacatgtactattttttaaaaattgtatcttttataataatacaataataaagagtaatcagtgttaatttttcttcaaatataagttttattataaatcattgttaacgtatcataagtcattaccgtatcgtatcttaatttttttttaaaaaccgctaattcacgtacccgtattgtattgtacccgcacctgtatcacaatcgatcttagttagaagaattgtctcgaggcggtgcaagacagcatataatagacgtggactctcttataccaaacgttgtcgtatcacaaagggttaggtaacaagtcacagtttgtccacgtgtcacgttttaattggaagaggtgccgttggcgtaatataacagccaatcgatttttgctataaaagcaaatcaggtaaactaaacttcttcattcttttcttccccatcgctacaaaaccggttcctttggaaaagagattcattcaaacctagcacccaattccgtttcaaggtataatctactttctattcttcgattattttattattattagctactatcgtttaatcgatcttttcttttgatccgtcaaatttaaattcaattagggttttgttcttttctttcatctgattgaaatccttctgaattgaaccgtttacttgattttactgtttattgtatgatttaatcctttgtttttcaaagacagtctttagattgtgattaggggttcatataaatttttagatttggatttttgtattgtatgattcaaaaaatacgtcctttaattagattagtacatggatattttttacccgatttattgattgtcagggagaatttgatgagcaagtttttttgatgtctgttgtaaattgaattgattataattgctgatctgctgcttccagttttcataacccatattcttttaaccttgttgtacacacaatgaaaaattggtgattgattcatttgtttttctttgttttggattatacagggtatggcgtccaagctggagaagtttacaaactgttacagcctctccaaaaccctcaggtttaaagcgatcccggtgggcaagacccaggagaacatcgacaacaagaggctcctggtggaagacgagaagcgcgccgaagactacaagggcgtgaagaagctgctcgataggtactacctcagctttattaacgacgtgctgcacagcatcaaactcaagaatctcaacaactacatctccctcttccgcaaaaagacccgcaccgagaaggagaacaaggagctggagaacctggagatcaacctccgcaaggaaatcgccaaagcgttcaagggcaatgaagggtacaagagcctcttcaagaaagacatcatcgaaactatcctcccagagtttctcgatgacaaggacgagatcgcgctggtgaactcctttaacgggttcacaaccgcgtttaccggcttctttgataacagggaaaatatgttctccgaggaggccaagtccaccagcatcgccttcaggtgtatcaacgagaacctcacccgctacatttccaatatggacattttcgagaaggtggatgcgatcttcgataagcacgaggtgcaggagatcaaagagaagattctcaattccgattatgacgtcgaggatttcttcgaaggggagttctttaattttgtgctcacacaagagggcattgacgtgtacaacgcgattatcgggggcttcgtcacagagtccggggagaagattaaggggctgaatgagtacatcaatctgtacaatcagaagaccaagcagaaactgccgaaattcaagccgctctacaagcaagtcctgtccgatagggaaagcctctccttctacggcgagggctataccagcgacgaggaggtgctggaagtcttccgcaacacactgaataagaatagcgagattttctcctccatcaagaagctcgagaagctctttaagaactttgacgagtacagctccgccgggattttcgtgaagaacgggccggcgatcagcaccatctccaaggacatctttggcgagtggaacgtcatcagggacaagtggaacgccgagtacgacgacatccacctgaagaagaaggcggtggtgaccgagaagtatgaggacgatcgcaggaagtccttcaaaaaaatcggctccttcagcctcgaacagctccaggagtatgccgatgcggatctgtccgtcgtcgagaagctgaaggaaatcatcattcagaaggtcgacgagatctataaagtgtacgggtccagcgagaagctgttcgacgccgactttgtgctcgagaagtccctcaaaaagaatgacgccgtggtggccattatgaaagacctgctcgactccgtgaagtccttcgaaaattacattaaagcgttctttggggaggggaaggaaactaacagggatgagtccttctatggcgactttgtcctcgcgtacgacatcctgctgaaggtcgaccacatttacgacgcgatccgcaactacgtgacacagaagccgtactccaaagacaagttcaagctgtacttccagaacccgcaatttatggggggctgggacaaggataaagagacagactaccgcgcgacaattctccgctatggctccaaatactatctggccatcatggacaagaagtacgcgaagtgcctgcagaagatcgacaaagacgacgtcaatggcaactatgaaaagatcaactacaagctgctgccgggtccgaacaagatgctcccgaaggtgttcttcagcaagaagtggatggcctactacaatccaagcgaggatattcagaaaatctataaaaacgggaccttcaagaagggggacatgtttaacctcaacgactgccacaagctcattgatttcttcaaggatagcatttcccgctacccgaaatggtccaatgcgtacgattttaacttctccgagacagaaaagtacaaagacatcgcgggcttttacagggaggtggaggagcaagggtataaagtttcttttgaatccgcgagcaagaaggaagtcgacaagctcgtcgaggagggcaagctctacatgttccaaatttataacaaggacttttccgacaagagccatgggaccccaaacctccacaccatgtacttcaaactgctctttgacgagaacaaccacgggcaaatcaggctgagcggcggcgccgaattattcatgcgcagggcctccctcaagaaggaagagctggtcgtccatccagccaattccccgatcgcgaacaagaacccggacaatccgaaaaagaccaccaccctgtcctacgacgtctacaaggacaaacgcttcagcgaagaccagtacgaattacacatcccaattgcgattaataagtgcccaaagaatatcttcaaaattaatacagaggtcagggtgctgctcaaacacgacgacaatccgtatgtcatcggcattgacaggggcgagcgcaatctgctctatatcgtggtcgtggatgggaagggcaatattgtggagcagtactccctgaacgagattatcaacaacttcaatgggattaggattaagaccgactatcacagcctgctcgacaagaaagaaaaagagaggtttgaggcccgccaaaactggacctccattgagaatatcaaagaattaaaggccggctatatttcccaagtcgtccacaagatctgcgagctggtggagaaatatgacgccgtgattgcgctcgaagacttaaattctgggttcaagaactcccgcgtgaaggtggaaaaacaggtgtatcagaaattcgagaaaatgctgatcgacaaactcaattatatggtggataagaagtccaacccgtgtgccacagggggcgcgctgaagggctatcagatcaccaacaagttcgagagcttcaagagcatgagcacccagaacgggtttattttctacatcccggcgtggctcacctccaagattgacccgagcaccggcttcgtgaacctcctgaagacaaagtatacctccattgccgacagcaagaagtttatctcctccttcgaccgcattatgtatgtgccggaggaggacctcttcgagttcgccctcgactacaaaaacttcagccgcacagatgcggattacatcaagaagtggaagctgtactcctacgggaacaggatccgcatcttcaggaatccaaaaaaaaataacgtctttgactgggaggaagtgtgcctgacatccgcctacaaggaactgttcaataaatacggcatcaattaccagcagggcgacattcgcgccctcctctgtgagcagtccgacaaagcgttttactccagcttcatggccctcatgtccctgatgctccaaatgaggaatagcatcacagggcgcaccgacgtcgacttcctcatcagcccggtgaagaactccgacgggatcttttacgactcccgcaactatgaggcgcaagagaatgcgatcctcccgaagaacgccgatgcgaacggggcctataatatcgccaggaaagtgctctgggccatcgggcagttcaaaaaggcggaggatgagaagctcgacaaggtgaaaattgccatttccaacaaggagtggctggagtacgcgcagacctccgtgaagcacggctcctccgagacaccaggcacctccgagagcgcgacgcccgagggcggctccggcggctccggcagcccgccgcctgccctccctccaaagaggcgaagaagtggtggatcttccggggggtccccccctcctgctttacctccaaaaagacgtcgttctggtggttcaagtggaggttctccacctcctgcacttcctcccaagagaagaaggagcggcggcagctcaggaggatcaccaccaccagctttgccacccaaaaggcgccggtgaaagggctctctgtcatgatttcatactttcattattgagctctgtaattacaattatgaccatgagaacatctcttattgtgtggccttttaattgctgatgttagtactgaaccaaagcttatcgtgatgatgtaaaagcaataagtacttgtttgtagcttctttgtgtctccctttgggcttaatacatctgtttagtgttgtggctttggcatagacttctcttggtaataatgccttgcaatgcaaaatttcaattatcaaattctattatgttctcaccttatggtaacagcttaccctgtggaagatgagattcttgagttgagtcattgccaatttttggcattagcttttgaattagtgaattttgacaaaaattaccgtgacactgattttgttgaagctcttaagtgtagtttttacaaaatttcagtggctcgttgtgattatgtcaaactcacggcgaatgtagttcttacagaatttcagtggctccctgcaggatcccaatggcgcgcctagctaactagctagccacgtgactcgcagaacgttgtgtggcgagacggaaagaaagtcacgcctccaaagagtgcagcatctcttctggctctcacggtcctctgtggatccatcgatatcgaattcctgcaggctcgaggtcattcatatgcttgagaagagagtcgggatagtccaaaataaaacaaaggtaagattacctggtcaaaagtgaaaacatcagttaaaaggtggtataaagtaaaatatcggtaataaaaggtggcccaaagtgaaatttactcttttctactattataaaaattgaggatgtttttgtcggtactttgatacgtcatttttgtatgaattggtttttaagtttattcgcttttggaaatgcatatctgtatttgagtcgggttttaagttcgtttgcttttgtaaatacagagggatttgtataagaaatatctttagaaaaacccatatgctaatttgacataatttttgagaaaaatatatattcaggcgaattctcacaatgaacaataataagattaaaatagctttcccccgttgcagcgcatgggtattttttctagtaaaaataaaagataaacttagactcaaaacatttacaaaaacaacccctaaagttcctaaagcccaaagtgctatccacgatccatagcaagcccagcccaacccaacccaacccaacccaccccagtccagccaactggacaatagtctccacacccccccactatcaccgtgagttgtccgcacgcaccgcacgtctcgcagccaaaaaaaaaaagaaagaaaaaaaagaaaaagaaaaaacagcaggtgggtccgggtcgtgggggccggaaacgcgaggaggatcgcgagccagcgacgaggagcttaggcctcatcgttgaagatgcctctgccgacagtggtcccaaagatggacccccacccacgaggagcatcgtggaaaaagaagacgttccaaccacgtcttcaaagcaagtggattgatgtgatatctccactgacgtaagggatgacgcacaatcccactatccttcgaggcctcatcgttgaagatgcctctgccgacagtggtcccaaagatggacccccacccacgaggagcatcgtggaaaaagaagacgttccaaccacgtcttcaaagcaagtggattgatgtgatatctccactgacgtaagggatgacgcacaatcccactatccttcgaagctccctccctccgcttccaaagaaacgccccccatcgccactatatacatacccccccctctcctcccatccccccaacccttctagaaccatcttccacacactcaagccacactattggagaacacacagggacaacacaccataagatccaagggaggcctccgccgccgccggtaaccaccccgcccctctcctctttctttctccgtttttttttccgtctcggtctcgatctttggccttggtagtttgggtgggcgagaggcggcttcgtgcgcgcccagatcggtgcgcgggaggggcgggatctcgcggctggggctctcgccggcgtggatccggcccggatctcgcggggaatggggctctcggatgtagatctgcgatccgccgttgttgggggagatgatggggggtttaaaatttccgccgtgctaaacaagatcaggaagaggggaaaagggcactatggtttatatttttatatatttctgctgcttcgtcaggcttagatgtgctagatctttctttcttctttttgtgggtagaatttgaatccctcagcattgttcatcggtagtttttcttttcatgatttgtgacaaatgcagcctcgtgcggagcttttttgtaggtagaaggcggccgcatggcccagtctaagcacgggttgacgaaggagatgactatgaagtatcgcatggaaggctgcgttgacggccacaaattcgtcattaccggcgagggcatcggctacccctttaaggtaagtttctgcttctacctttgatatatatataataattatcattaattagtagtaatataatatttcaaatatttttttcaaaataaaagaatgtagtatatagcaattgcttttctgtagtttataagtgtgtatattttaatttataacttttctaatatatgaccaaaatttgttgatgtgcagggcaagcaagcgataaacctgtgcgtggtggagggtggccctctgcccttcgccgaggatatactctcagccgccttcatgtacgggaatcgggtgttcacggagtacccgcaagacatcgtggactacttcaagaactcctgccccgccggatacacatgggaccgttccttcctcttcgaggacggagccgtttgcatctgcaacgcggacatcaccgtgtccgtcgaggagaactgcatgtaccacgagtcaaagttctatggagtgaacttcccggccgatggtcccgtgatgaagaaaatgacggacaactgggagccgtcgtgcgagaaaatcattcccgtcccaaaacagggaatcctcaagggcgacgtgtcgatgtacctacttctcaaggacggtggacggctacggtgccagttcgacactgtttacaaggcgaagtcggtgccgaggaagatgccggactggcactttatccagcacaagctgacaagggaggacagaagcgacgctaagaaccagaaatggcacctcaccgagcacgccatcgccagtggctctgcgctgcccgggtgaccctgcaatgtgaccctagacttgtccatcttctggattggccaacttaattaatgtatgaaataaaaggatgcacacatagtgacatgctaatcactataatgtgggcatcaaagttgtgtgttatgtgtaattactaattatctgaataagagaaagagatcatccatatttcttatcctaaatgaatgtcacgtgtctttataattctttgatgaaccagatgcattttattaaccaattccatatacatataaatattaatcatatataattaatatcaattgggttagcaaaacaaatctagtctaggtgtgttttgctaattattgggggatagtgcaaaaagaaatctacgttctcaataattcagatagaaaacttaataaagtgagataatttacatagattgcttttatcctttgatatatgtgaaaccatgcatgatataaggaaaatagatagagaaataattttttacatcgttgaatatgtaaacaatttaattcaagaagctaggaatataaatattgaggagtttatgattattattattattttgatgttcaatgaagttttttttaatttcatatgaagtatacaaaaattcttcatagatttttgtttctatgccgtagttatctttaatatatttgtggttgaagaaatttattgctagaaacgaatggattgtcaatttttttttaaagcaaatatatatgaaattatactgtatattattttagtcatgattaaaatgtggccttaattgaatcatctttctcattcattttttcaaaagcatatcaggatgattgatatttatctattttaaaaattaatttaagggttcaaattaaatttaacttaaaagtgtcctaaccgtagttaaaggtttactttaaaaaaatactatgaaaaatctaatcttctatgaatcgagggcccggccgtgacggccacgagcgaactcctgcaggcgataaaaatgttttaaacgatatatattataaaaaaaaacgtttcaaaaataaatacaaaaatgtttttaaatatatataatttaactcattaaagaaaataaaaatgcaagtgcggtgacaagacaagctaaaagttgcaaaagaaatggcagggctataaggctcacctactcctggatttaccaaattttggttcgtccctatactcgaaaaataaaacaaaataaatttcagtatcttcgtttttgtatgctttgactgtgaggcgaggccaactttcttcttctgtctgagatgaattttgtttgcctcctgtgaaggatgtatcattcaaagtgaatgttttgcaactgccagtagtcccacatcgaccaaatattcttattacagtgtgtttatatagcacctggagaaggaatgggttgtttcaaagattaaataatttctactaagtgtagattgccgttaatttgagagtccaagtaatttctactaagtgtagatttttttttgcggccgcacaacaaacgcgccggcga

SEQ ID NO: 133 - DNA, 19066 bp, synthetic construct
  misc_feature 1..19066: note = pWISE3092 Full Plasmid Sequence
  source 1..19066: mol_type = other DNA
agcttactagtcaacaattggccaatctttgttctaaattgctaataaacgaccatttccgtcaattctccttggttgcaacagtctacccgtcaaatgtttactaatttataagtgtgaagtttgaattatgaaagacgaaatcgtattaaaaattcacaagaataaacaactccatagattttcaaaaaaacagtcacgagaaaaaaaccacagtccgtttgtctgctcttctagtttttattatttttctattaatagttttttgttatttcgagaataaaatttgaacgatgtccgaaccacaaaagccgagccgataaatcctaagccgagcctaactttagccgtaaccatcagtcacggctcccgggctaattcatttgaaccgaatcataatcaacggtttagatcaaactcaaaacaatctaacggcaacatagacgcgtcggtgagctaaaaagagtgtgaaagccaggtcaccatagcattgtctctcccagattttttatttgggaaataatagaagaaatagaaaaaaataaaagagtgagaaaaatcgtagagctatatattcgcacatgtactcgtttcgctttccttagtgttagctgctgccgctgttgtttctcctccatttctctatctttctctctcgctgcttctcgaatcttctgtatcatcttcttcttcttcaaggtgagtctctagatccgttcgcttgattttgctgctcgttagtcgttattgttgattctctatgccgatttcgctagatctgtttagcatgcgttgtggttttatgagaaaatctttgttttgggggttgcttgttatgtgattcgatccgtgcttgttggatcgatctgagctaattcttaaggtttatgtgttagatctatggagtttgaggattcttctcgcttctgtcgatctctcgctgttatttttgtttttttcagtgaagtgaagttgtttagttcgaaatgacttcgtgtatgctcgattgatctggttttaatcttcgatctgttaggtgttgatgtttacaagtgaattctagtgttttctcgttgagatctgtgaagtttgaacctagttttctcaataatcaacatatgaagcgatgtttgagtttcaataaacgctgctaatcttcgaaactaagttgtgatctgattcgtgtttacttcatgagcttatccaattcatttcggtttcattttactttttttttagtgaaccatggcgcaagttagcagaatctgcaatggtgtgcagaacccatctcttatctccaatctctcgaaatccagtcaacgcaaatctcccttatcggtttctctgaagacgcagcagcatccacgagcttatccgatttcgtcgtcgtggggattgaagaagagtgggatgacgttaattggctctgagcttcgtcctcttaaggtcatgtcttctgtttccacggcgtgcatgggggaagcggtgatcgccgaagtatcgactcaactatcagaggtagttggcgtcatcgagcgccatctcgaaccgacgttgctggccgtacatttgtacggctccgcagtggatggcggcctgaagccacacagtgatattgatttgctggttacggtgaccgtaaggcttgatgaaacaacgcggcgagctttgatcaacgaccttttggaaacttcggcttcccctggagagagcgagattctccgcgctgtagaagtcaccattgttgtgcacgacgacatcattccgtggcgttatccagctaagcgcgaactgcaatttggagaatggcagcgcaatgacattcttgcaggtatcttcgagccagccacgatcgacattgatctggctatcttgctgacaaaagcaagagaacatagcgttgccttggtaggtccagcggcggaggaactctttgatccggttcctgaacaggatctatttgaggcgctaaatgaaaccttaacgctatggaactcgccgcccgactgggctggcgatgagcgaaatgtagtgcttacgttgtcccgcatttggtacagcgcagtaaccggcaaaatcgcgccgaaggatgtcgctgccgactgggcaatggagcgcctgccggcccagtatcagcccgtcatacttgaagctagacaggcttatcttggacaagaagaagatcgcttggcctcgcgcgcagatcagttggaagaatttgtccactacgtgaaaggcgagatcaccaaggtagtcggcaaataaggatcaattcccgatcgttcaaacatttggcaataaagtttcttaagattgaatcctgttgccggtcttgcgatgattatcatataatttctgttgaattacgttaagcatgtaataattaacatgtaatgcatgacgttatttatgagatgggtttttatgattagagtcccgcaattatacatttaatacgcgatagaaaacaaaatatagcgcgcaaactaggataaattatcgcgcgcggtgtcatctatgttactagatcggtacctacgcgtagctagcccgtgaagtttctcatctaagcccccatttggacgtgaatgtagacacgtcgaaataaagatttccgaattagaataatttgtttattgctttcgcctataaatacgacggatcgtaatttgtcgttttatcaaaatgtactttcattttataataacgctgcggacatctacatttttgaattgaaaaaaaattggtaattactctttctttttctccatattgaccatcatactcattgctgatccatgtagatttcccggacatgaagccatttacaattgaatatatcctgccgccgctgccgctttgcacccggtggagcttgcatgttggtttctacgcagaactgagccggttaggcagataatttccattgagaactgagccatgtgcaccttccccccaacacggtgagcgacggggcaacggagtgatccacatgggacttttcctagcttggctgccatttttggggtgaggccgttcgcggccgaggggcgcagcccctggggggatgggaggcccgcgttagcgggccgggagggttcgagaagggggggcaccccccttcggcgtgcgcggtcacgcgcacagggcgcagccctggttaaaaacaaggtttataaatattggtttaaaagcaggttaaaagacaggttagcggtggccgaaaaacgggcggaaacccttgcaaatgctggattttctgcctgtggacagcccctcaaatgtcaataggtgcgcccctcatctgtcagcactctgcccctcaagtgtcaaggatcgcgcccctcatctgtcagtagtcgcgcccctcaagtgtcaataccgcagggcacttatccccaggcttgtccacatcatctgtgggaaactcgcgtaaaatcaggcgttttcgccgatttgcgaggctggccagctccacgtcgccggccgaaatcgagcctgcccctcatctgtcaacgccgcgccgggtgagtcggcccctcaagtgtcaacgtccgcccctcatctgtcagtgagggccaagttttccgcgaggtatccacaacgccggcggccggccgcggtgtctcgcacacggcttcgacggcgtttctggcgcgtttgcagggccatagacggccgccagcccagcggcgagggcaaccagcccggtgagcgtcggaaagggtcgatcgaccgatgcccttgagagccttcaacccagtcagctccttccggtgggcgcggggcatgactatcgtcgccgcacttatgactgtcttctttatcatgcaactcgtaggacaggtgccggcagcgctctgggtcattttcggcgaggaccgctttcgctggagcgcgacgatgatcggcctgtcgcttgcggtattcggaatcttgcacgccctcgctcaagccttcgtcactggtcccgccaccaaacgtttcggcgagaagcaggccattatcgccggcatggcggccgacgcgctgggctacgtcttgctggcgttcgcgacgcgaggctggatggccttccccattatgattcttctcgcttccggcggcatcgggatgcccgcgttgcaggccatgctgtccaggcaggtagatgacgaccatcagggacagcttcaaggatcgctcgcggctcttaccagcctaacttcgatcattggaccgctgatcgtcacggcgatttatgccgcctcggcgagcacatggaacgggttggcatggattgtaggcgccgccctataccttgtctgcctccccgcgttgcgtcgcggtgcatggagccgggccacctcgacctgaatggaagccggcggcacctcgctaacggattcaccactccaagaattggagccaatcaattcttgcggagaactgtgaatgcgcaaaccaacccttggcagaacatatccatcgcgtccgccatctccagcagccgcacgcggcgcatctcgggcagcgttgggtcctggccacgggtgcgcatgatcgtgctcctgtcgttgaggacccggctaggctggcggggttgccttactggttagcagaatgaatcaccgatacgcgagcgaacgtgaagcgactgctgctgcaaaacgtctgcgacctgagcaacaacatgaatggtcttcggtttccgtgtttcgtaaagtctggaaacgcggaagtcagcgccctgcaccattatgttccggatctgcatcgcaggatgctgctggctaccctgtggaacacctacatctgtattaacgaagcgctggcattgaccctgagtgatttttctctggtcccgccgcatccataccgccagttgtttaccctcacaacgttccagtaaccgggcatgttcatcatcagtaacccgtatcgtgagcatcctctctcgtttcatcggtatcattacccccatgaacagaaatcccccttacacggaggcatcagtgaccaaacaggaaaaaaccgcccttaacatggcccgctttatcagaagccagacattaacgcttctggagaaactcaacgagctggacgcggatgaacaggcagacatctgtgaatcgcttcacgaccacgctgatgagctttaccgcagctgcctcgcgcgtttcggtgatgacggtgaaaacctctgacacatgcagctcccggagacggtcacagcttgtctgtaagcggatgccgggagcagacaagcccgtcagggcgcgtcagcgggtgttggcgggtgtcggggcgcagccatgacccagtcacgtagcgatagcggagtgtatactggcttaactatgcggcatcagagcagattgtactgagagtgcaccatatgcggtgtgaaataccgcacagatgcgtaaggagaaaataccgcatcaggcgctcttccgcttcctcgctcactgactcgctgcgctcggtcgttcggctgcggcgagcggtatcagctcactcaaaggcggtaatacggttatccacagaatcaggggataacgcaggaaagaacatgtgagcaaaaggccagcaaaaggccaggaaccgtaaaaaggccgcgttgctggcgtttttccataggctccgcccccctgacgagcatcacaaaaatcgacgctcaagtcagaggtggcgaaacccgacaggactataaagataccaggcgtttccccctggaagctccctcgtgcgctctcctgttccgaccctgccgcttaccggatacctgtccgcctttctcccttcgggaagcgtggcgctttctcatagctcacgctgtaggtatctcagttcggtgtaggtcgttcgctccaagctgggctgtgtgcacgaaccccccgttcagcccgaccgctgcgccttatccggtaactatcgtcttgagtccaacccggtaagacacgacttatcgccactggcagcagccactggtaacaggattagcagagcgaggtatgtaggcggtgctacagagttcttgaagtggtggcctaactacggctacactagaaggacagtatttggtatctgcgctctgctgaagccagttaccttcggaaaaagagttggtagctcttgatccggcaaacaaaccaccgctggtagcggtggtttttttgtttgcaagcagcagattacgcgcagaaaaaaaggatctcaagaagatcctttgatcttttctacggggtctgacgctcagtggaacgaaaactcacgttaagggattttggtcatgagattatcaaaaaggatcttcacctagatccttttaaattaaaaatgaagttttaaatcaatctaaagtatatatgagtaaacttggtctgacagttaccaatgcttaatcagtgaggcacctatctcagcgatctgtctatttcgttcatccatagttgcctgactccccgtcgtgtagataactacgatacgggagggcttaccatctggccccagtgctgcaatgataccgcgagacccacgctcaccggctccagatttatcagcaataaaccagccagccggaagggccgagcgcagaagtggtcctgcaactttatccgcctccatccagtctattaattgttgccgggaagctagagtaagtagttcgccagttaatagtttgcgcaacgttgttgccattgctgcaggtcgggagcacaggatgacgcctaacaattcattcaagccgacaccgcttcgcggcgcggcttaattcaggagttaaacatcatgagggaagcggtgatcgccgaagtatcgactcaactatcagaggtagttggcgtcatcgagcgccatctcgaaccgacgttgctggccgtacatttgtacggctccgcagtggatggcggcctgaagccacacagtgatattgatttgctggttacggtgaccgtaaggcttgatgaaacaacgcggcgagctttgatcaacgaccttttggaaacttcggcttcccctggagagagcgagattctccgcgctgtagaagtcaccattgttgtgcacgacgacatcattccgtggcgttatccagctaagcgcgaactgcaatttggagaatggcagcgcaatgacattcttgcaggtatcttcgagccagccacgatcgacattgatctggctatcttgctgacaaaagcaagagaacatagcgttgccttggtaggtccagcggcggaggaactctttgatccggttcctgaacaggatctatttgaggcgctaaatgaaaccttaacgctatggaactcgccgcccgactgggctggcgatgagcgaaatgtagtgcttacgttgtcccgcatttggtacagcgcagtaaccggcaaaatcgcgccgaaggatgtcgctgccgactgggcaatggagcgcctgccggcccagtatcagcccgtcatacttgaagctaggcaggcttatcttggacaagaagatcgcttggcctcgcgcgcagatcagttggaagaatttgttcactacgtgaaaggcgagatcaccaaggtagtcggcaaataatgtctaacaattcgttcaagccgacgccgcttcgcggcgcggcttaactcaagcgttagatgctgcaggcatcgtggtgtcacgctcgtcgtttggtatggcttcattcagctccggttcccaacgatcaaggcgagttacatgatcccccatgttgtgcaaaaaagcggttagctccttcggtcctccgatcgaggatttttcggcgctgcgctacgtccgcgaccgcgttgagggatcaagccacagcagcccactcgaccttctagccgacccagacgagccaagggatctttttggaatgctgctccgtcgtcaggctttccgacgtttgggtggttgaacagaagtcattatcgcacggaatgccaagcactcccgaggggaaccctgtggttggcatgcacatacaaatggacgaacggataaaccttttcacgcccttttaaatatccgattattctaataaacgctcttttctcttaggtttacccgccaatatatcctgtcaaacactgatagtttaaactgaaggcgggaaacgacaatctggcgcgccactgttaataatttttaaacgtcagcgcactaaaaaaacgaaaagacggacacgtgaaaataaaaaacacacactagtttatgacgcaatactattttacttatgatttgggtacattagacaaaaccgtgaaagagatgtatcagctatgaaacctgtatacttcaatacagagacttactcatatcggatacgtacgcacgaagtatcatattaattattttaatttttaataaatattttatcggatacttatgtgatactctacatatacacaaggatatttctaagatactttatagatacgtatcctagaaaaacatgaagagtaaaaaagtgagacaatgttgtaaaaattcattataaatgtatatgattcaattttagatatgcatcagtataattgattctcgatgaaacacttaaaattatatttcttgtggaagaacgtagcgagagaggtgattcagttagacaacattaaataaaattaatgttaagttcttttaatgatgtttctctcaatatcacatcatatgaaaatgtaatatgatttataagaaaatttttaaaaaatttattttaataatcacatgtactattttttaaaaattgtatcttttataataatacaataataaagagtaatcagtgttaatttttcttcaaatataagttttattataaatcattgttaacgtatcataagtcattaccgtatcgtatcttaatttttttttaaaaaccgctaattcacgtacccgtattgtattgtacccgcacctgtatcacaatcgatcttagttagaagaattgtctcgaggcggtgcaagacagcatataatagacgtggactctcttataccaaacgttgtcgtatcacaaagggttaggtaacaagtcacagtttgtccacgtgtcacgttttaattggaagaggtgccgttggcgtaatataacagccaatcgatttttgctataaaagcaaatcaggtaaactaaacttcttcattcttttcttccccatcgctacaaaaccggttcctttggaaaagagattcattcaaacctagcacccaattccgtttcaaggtataatctactttctattcttcgattattttattattattagctactatcgtttaatcgatcttttcttttgatccgtcaaatttaaattcaattagggttttgttcttttctttcatctgattgaaatccttctgaattgaaccgtttacttgattttactgtttattgtatgatttaatcctttgtttttcaaagacagtctttagattgtgattaggggttcatataaatttttagatttggatttttgtattgtatgattcaaaaaatacgtcctttaattagattagtacatggatattttttacccgatttattgattgtcagggagaatttgatgagcaagtttttttgatgtctgttgtaaattgaattgattataattgctgatctgctgcttccagttttcataacccatattcttttaaccttgttgtacacacaatgaaaaattggtgattgattcatttgtttttctttgttttggattatacagggtatggcgggtccagacatcgttatgactcaatccccctcaagcctttcagcctccgtgggcgacagagttaccattacctgccgctcaagcactggagcagtgaccacttctaactacgctagctgggtgcaggagaagccaggaaagctgttcaaggggctgattggaggcacaaacaatagagcccctggcgtgccatccaggttttctggaagcctgattggcgataaggcaacactgaccatctctagcctgcagcccgaggacttcgctacctacttttgcgccctgtggtatagcaatcactgggtgttcggtcaggggactaaggtggaactgaagagaggtgggggaggctccggtgggggaggctcaggtgggggaggctcctcaggtgggggatctgaggtgaagctgctggaaagcggcggtgggctggtgcagcccggaggctccctgaagctgtcatgtgccgtgtctggattttcactgaccgattacggcgtgaactgggtgagacaggcccctggaaggggactggagtggattggagtgatttggggagatgggatcacagactacaattccgcactgaaggatagattcattatctcaaaggacaacggaaagaacaccgtgtatctgcagatgtctaaggtgaggagcgatgacactgccctgtactattgcgtgacagggctgtttgactattgggggcaaggcactctggttaccgtgagcagctatccatacgatgttcccgactacgctggctcctccgagacaccaggcacctccgagagcgcgacgcccgagggcggctccggcggctccggcagctccaagctggagaagtttacaaactgttacagcctctccaaaaccctcaggtttaaagcgatcccggtgggcaagacccaggagaacatcgacaacaagaggctcctggtggaagacgagaagcgcgccgaagactacaagggcgtgaagaagctgctcgataggtactacctcagctttattaacgacgtgctgcacagcatcaaactcaagaatctcaacaactacatctccctcttccgcaaaaagacccgcaccgagaaggagaacaaggagctggagaacctggagatcaacctccgcaaggaaatcgccaaagcgttcaagggcaatgaagggtacaagagcctcttcaagaaagacatcatcgaaactatcctcccagagtttctcgatgacaaggacgagatcgcgctggtgaactcctttaacgggttcacaaccgcgtttaccggcttctttgataacagggaaaatatgttctccgaggaggccaagtccaccagcatcgccttcaggtgtatcaacgagaacctcacccgctacatttccaatatggacattttcgagaaggtggatgcgatcttcgataagcacgaggtgcaggagatcaaagagaagattctcaattccgattatgacgtcgaggatttcttcgaaggggagttctttaattttgtgctcacacaagagggcattgacgtgtacaacgcgattatcgggggcttcgtcacagagtccggggagaagattaaggggctgaatgagtacatcaatctgtacaatcagaagaccaagcagaaactgccgaaattcaagccgctctacaagcaagtcctgtccgatagggaaagcctctccttctacggcgagggctataccagcgacgaggaggtgctggaagtcttccgcaacacactgaataagaatagcgagattttctcctccatcaagaagctcgagaagctctttaagaactttgacgagtacagctccgccgggattttcgtgaagaacgggccggcgatcagcaccatctccaaggacatctttggcgagtggaacgtcatcagggacaagtggaacgccgagtacgacgacatccacctgaagaagaaggcggtggtgaccgagaagtatgaggacgatcgcaggaagtccttcaaaaaaatcggctccttcagcctcgaacagctccaggagtatgccgatgcggatctgtccgtcgtcgagaagctgaaggaaatcatcattcagaaggtcgacgagatctataaagtgtacgggtccagcgagaagctgttcgacgccgactttgtgctcgagaagtccctcaaaaagaatgacgccgtggtggccattatgaaagacctgctcgactccgtgaagtccttcgaaaattacattaaagcgttctttggggaggggaaggaaactaacagggatgagtccttctatggcgactttgtcctcgcgtacgacatcctgctgaaggtcgaccacatttacgacgcgatccgcaactacgtgacacagaagccgtactccaaagacaagttcaagctgtacttccagaacccgcaatttatggggggctgggacaaggataaagagacagactaccgcgcgacaattctccgctatggctccaaatactatctggccatcatggacaagaagtacgcgaagtgcctgcagaagatcgacaaagacgacgtcaatggcaactatgaaaagatcaactacaagctgctgccgggtccgaacaagatgctcccgaaggtgttcttcagcaagaagtggatggcctactacaatccaagcgaggatattcagaaaatctataaaaacgggaccttcaagaagggggacatgtttaacctcaacgactgccacaagctcattgatttcttcaaggatagcatttcccgctacccgaaatggtccaatgcgtacgattttaacttctccgagacagaaaagtacaaagacatcgcgggcttttacagggaggtggaggagcaagggtataaagtttcttttgaatccgcgagcaagaaggaagtcgacaagctcgtcgaggagggcaagctctacatgttccaaatttataacaaggacttttccgacaagagccatgggaccccaaacctccacaccatgtacttcaaactgctctttgacgagaacaaccacgggcaaatcaggctgagcggcggcgccgaattattcatgcgcagggcctccctcaagaaggaagagctggtcgtccatccagccaattccccgatcgcgaacaagaacccggacaatccgaaaaagaccaccaccctgtcctacgacgtctacaaggacaaacgcttcagcgaagaccagtacgaattacacatcccaattgcgattaataagtgcccaaagaatatcttcaaaattaatacagaggtcagggtgctgctcaaacacgacgacaatccgtatgtcatcggcattgacaggggcgagcgcaatctgctctatatcgtggtcgtggatgggaagggcaatattgtggagcagtactccctgaacgagattatcaacaacttcaatgggattaggattaagaccgactatcacagcctgctcgacaagaaagaaaaagagaggtttgaggcccgccaaaactggacctccattgagaatatcaaagaattaaaggccggctatatttcccaagtcgtccacaagatctgcgagctggtggagaaatatgacgccgtgattgcgctcgaagacttaaattctgggttcaagaactcccgcgtgaaggtggaaaaacaggtgtatcagaaattcgagaaaatgctgatcgacaaactcaattatatggtggataagaagtccaacccgtgtgccacagggggcgcgctgaagggctatcagatcaccaacaagttcgagagcttcaagagcatgagcacccagaacgggtttattttctacatcccggcgtggctcacctccaagattgacccgagcaccggcttcgtgaacctcctgaagacaaagtatacctccattgccgacagcaagaagtttatctcctccttcgaccgcattatgtatgtgccggaggaggacctcttcgagttcgccctcgactacaaaaacttcagccgcacagatgcggattacatcaagaagtggaagctgtactcctacgggaacaggatccgcatcttcaggaatccaaaaaaaaataacgtctttgactgggaggaagtgtgcctgacatccgcctacaaggaactgttcaataaatacggcatcaattaccagcagggcgacattcgcgccctcctctgtgagcagtccgacaaagcgttttactccagcttcatggccctcatgtccctgatgctccaaatgaggaatagcatcacagggcgcaccgacgtcgacttcctcatcagcccggtgaagaactccgacgggatcttttacgactcccgcaactatgaggcgcaagagaatgcgatcctcccgaagaacgccgatgcgaacggggcctataatatcgccaggaaagtgctctgggccatcgggcagttcaaaaaggcggaggatgagaagctcgacaaggtgaaaattgccatttccaacaaggagtggctggagtacgcgcagacctccgtgaagcactgaaagggctctctgtcatgatttcatactttcattattgagctctgtaattacaattatgaccatgagaacatctcttattgtgtggccttttaattgctgatgttagtactgaaccaaagcttatcgtgatgatgtaaaagcaataagtacttgtttgtagcttctttgtgtctccctttgggcttaatacatctgtttagtgttgtggctttggcatagacttctcttggtaataatgccttgcaatgcaaaatttcaattatcaaattctattatgttctcaccttatggtaacagcttaccctgtggaagatgagattcttgagttgagtcattgccaatttttggcattagcttttgaattagtgaattttgacaaaaattaccgtgacactgattttgttgaagctcttaagtgtagtttttacaaaatttcagtggctcgttgtgattatgtcaaactcacggcgaatgtagttcttacagaatttcagtggctccctgcaggatcccaatggcgcgcctagctaactagctagccacgtgactcgcagaacgttgtgtggcgagacggaaagaaagtcacgcctccaaagagtgcagcatctcttctggctctcacggtcctctgtggatccatcgatatcgaattcctgcaggctcgaggtcattcatatgcttgagaagagagtcgggatagtccaaaataaaacaaaggtaagattacctggtcaaaagtgaaaacatcagttaaaaggtggtataaagtaaaatatcggtaataaaaggtggcccaaagtgaaatttactcttttctactattataaaaattgaggatgtttttgtcggtactttgatacgtcatttttgtatgaattggtttttaagtttattcgcttttggaaatgcatatctgtatttgagtcgggttttaagttcgtttgcttttgtaaatacagagggatttgtataagaaatatctttagaaaaacccatatgctaatttgacataatttttgagaaaaatatatattcaggcgaattctcacaatgaacaataataagattaaaatagctttcccccgttgcagcgcatgggtattttttctagtaaaaataaaagataaacttagactcaaaacatttacaaaaacaacccctaaagttcctaaagcccaaagtgctatccacgatccatagcaagcccagcccaacccaacccaacccaacccaccccagtccagccaactggacaatagtctccacacccccccactatcaccgtgagttgtccgcacgcaccgcacgtctcgcagccaaaaaaaaaaagaaagaaaaaaaagaaaaagaaaaaacagcaggtgggtccgggtcgtgggggccggaaacgcgaggaggatcgcgagccagcgacgaggagcttaggcctcatcgttgaagatgcctctgccgacagtggtcccaaagatggacccccacccacgaggagcatcgtggaaaaagaagacgttccaaccacgtcttcaaagcaagtggattgatgtgatatctccactgacgtaagggatgacgcacaatcccactatccttcgaggcctcatcgttgaagatgcctctgccgacagtggtcccaaagatggacccccacccacgaggagcatcgtggaaaaagaagacgttccaaccacgtcttcaaagcaagtggattgatgtgatatctccactgacgtaagggatgacgcacaatcccactatccttcgaagctccctccctccgcttccaaagaaacgccccccatcgccactatatacatacccccccctctcctcccatccccccaacccttctagaaccatcttccacacactcaagccacactattggagaacacacagggacaacacaccataagatccaagggaggcctccgccgccgccggtaaccaccccgcccctctcctctttctttctccgtttttttttccgtctcggtctcgatctttggccttggtagtttgggtgggcgagaggcggcttcgtgcgcgcccagatcggtgcgcgggaggggcgggatctcgcggctggggctctcgccggcgtggatccggcccggatctcgcggggaatggggctctcggatgtagatctgcgatccgccgttgttgggggagatgatggggggtttaaaatttccgccgtgctaaacaagatcaggaagaggggaaaagggcactatggtttatatttttatatatttctgctgcttcgtcaggcttagatgtgctagatctttctttcttctttttgtgggtagaatttgaatccctcagcattgttcatcggtagtttttcttttcatgatttgtgacaaatgcagcctcgtgcggagcttttttgtaggtagaaggcggccgcatggcccagtctaagcacgggttgacgaaggagatgactatgaagtatcgcatggaaggctgcgttgacggccacaaattcgtcattaccggcgagggcatcggctacccctttaaggtaagtttctgcttctacctttgatatatatataataattatcattaattagtagtaatataatatttcaaatatttttttcaaaataaaagaatgtagtatatagcaattgcttttctgtagtttataagtgtgtatattttaatttataacttttctaatatatgaccaaaatttgttgatgtgcagggcaagcaagcgataaacctgtgcgtggtggagggtggccctctgcccttcgccgaggatatactctcagccgccttcatgtacgggaatcgggtgttcacggagtacccgcaagacatcgtggactacttcaagaactcctgccccgccggatacacatgggaccgttccttcctcttcgaggacggagccgtttgcatctgcaacgcggacatcaccgtgtccgtcgaggagaactgcatgtaccacgagtcaaagttctatggagtgaacttcccggccgatggtcccgtgatgaagaaaatgacggacaactgggagccgtcgtgcgagaaaatcattcccgtcccaaaacagggaatcctcaagggcgacgtgtcgatgtacctacttctcaaggacggtggacggctacggtgccagttcgacactgtttacaaggcgaagtcggtgccgaggaagatgccggactggcactttatccagcacaagctgacaagggaggacagaagcgacgctaagaaccagaaatggcacctcaccgagcacgccatcgccagtggctctgcgctgcccgggtgaccctgcaatgtgaccctagacttgtccatcttctggattggccaacttaattaatgtatgaaataaaaggatgcacacatagtgacatgctaatcactataatgtgggcatcaaagttgtgtgttatgtgtaattactaattatctgaataagagaaagagatcatccatatttcttatcctaaatgaatgtcacgtgtctttataattctttgatgaaccagatgcattttattaaccaattccatatacatataaatattaatcatatataattaatatcaattgggttagcaaaacaaatctagtctaggtgtgttttgctaattattgggggatagtgcaaaaagaaatctacgttctcaataattcagatagaaaacttaataaagtgagataatttacatagattgcttttatcctttgatatatgtgaaaccatgcatgatataaggaaaatagatagagaaataattttttacatcgttgaatatgtaaacaatttaattcaagaagctaggaatataaatattgaggagtttatgattattattattattttgatgttcaatgaagttttttttaatttcatatgaagtatacaaaaattcttcatagatttttgtttctatgccgtagttatctttaatatatttgtggttgaagaaatttattgctagaaacgaatggattgtcaatttttttttaaagcaaatatatatgaaattatactgtatattattttagtcatgattaaaatgtggccttaattgaatcatctttctcattcattttttcaaaagcatatcaggatgattgatatttatctattttaaaaattaatttaagggttcaaattaaatttaacttaaaagtgtcctaaccgtagttaaaggtttactttaaaaaaatactatgaaaaatctaatcttctatgaatcgagggcccggccgtgacggccacgagcgaactcctgcaggcgataaaaatgttttaaacgatatatattataaaaaaaaacgtttcaaaaataaatacaaaaatgtttttaaatatatataatttaactcattaaagaaaataaaaatgcaagtgcggtgacaagacaagctaaaagttgcaaaagaaatggcagggctataaggctcacctactcctggatttaccaaattttggttcgtccctatactcgaaaaataaaacaaaataaatttcagtatcttcgtttttgtatgctttgactgtgaggcgaggccaactttcttcttctgtctgagatgaattttgtttgcctcctgtgaaggatgtatcattcaaagtgaatgttttgcaactgccagtagtcccacatcgaccaaatattcttattacagtgtgtttatatagcacctggagaaggaatgggttgtttcaaagattaaataatttctactaagtgtagattgccgttaatttgagagtccaagtaatttctactaagtgtagatttttttttgcggccgcacaacaaacgcgccggcga

SEQ ID NO: 134 - DNA, 18424 bp, synthetic construct
  misc_feature 1..18424: note = pWISE3089 Full Plasmid Sequence
  source 1..18424: mol_type = other DNA
agcttactagtcaacaattggccaatctttgttctaaattgctaataaacgaccatttccgtcaattctccttggttgcaacagtctacccgtcaaatgtttactaatttataagtgtgaagtttgaattatgaaagacgaaatcgtattaaaaattcacaagaataaacaactccatagattttcaaaaaaacagtcacgagaaaaaaaccacagtccgtttgtctgctcttctagtttttattatttttctattaatagttttttgttatttcgagaataaaatttgaacgatgtccgaaccacaaaagccgagccgataaatcctaagccgagcctaactttagccgtaaccatcagtcacggctcccgggctaattcatttgaaccgaatcataatcaacggtttagatcaaactcaaaacaatctaacggcaacatagacgcgtcggtgagctaaaaagagtgtgaaagccaggtcaccatagcattgtctctcccagattttttatttgggaaataatagaagaaatagaaaaaaataaaagagtgagaaaaatcgtagagctatatattcgcacatgtactcgtttcgctttccttagtgttagctgctgccgctgttgtttctcctccatttctctatctttctctctcgctgcttctcgaatcttctgtatcatcttcttcttcttcaaggtgagtctctagatccgttcgcttgattttgctgctcgttagtcgttattgttgattctctatgccgatttcgctagatctgtttagcatgcgttgtggttttatgagaaaatctttgttttgggggttgcttgttatgtgattcgatccgtgcttgttggatcgatctgagctaattcttaaggtttatgtgttagatctatggagtttgaggattcttctcgcttctgtcgatctctcgctgttatttttgtttttttcagtgaagtgaagttgtttagttcgaaatgacttcgtgtatgctcgattgatctggttttaatcttcgatctgttaggtgttgatgtttacaagtgaattctagtgttttctcgttgagatctgtgaagtttgaacctagttttctcaataatcaacatatgaagcgatgtttgagtttcaataaacgctgctaatcttcgaaactaagttgtgatctgattcgtgtttacttcatgagcttatccaattcatttcggtttcattttactttttttttagtgaaccatggcgcaagttagcagaatctgcaatggtgtgcagaacccatctcttatctccaatctctcgaaatccagtcaacgcaaatctcccttatcggtttctctgaagacgcagcagcatccacgagcttatccgatttcgtcgtcgtggggattgaagaagagtgggatgacgttaattggctctgagcttcgtcctcttaaggtcatgtcttctgtttccacggcgtgcatgggggaagcggtgatcgccgaagtatcgactcaactatcagaggtagttggcgtcatcgagcgccatctcgaaccgacgttgctggccgtacatttgtacggctccgcagtggatggcggcctgaagccacacagtgatattgatttgctggttacggtgaccgtaaggcttgatgaaacaacgcggcgagctttgatcaacgaccttttggaaacttcggcttcccctggagagagcgagattctccgcgctgtagaagtcaccattgttgtgcacgacgacatcattccgtggcgttatccagctaagcgcgaactgcaatttggagaatggcagcgcaatgacattcttgcaggtatcttcgagccagccacgatcgacattgatctggctatcttgctgacaaaagcaagagaacatagcgttgccttggtaggtccagcggcggaggaactctttgatccggttcctgaacaggatctatttgaggcgctaaatgaaaccttaacgctatggaactcgccgcccgactgggctggcgatgagcgaaatgtagtgcttacgttgtcccgcatttggtacagcgcagtaaccggcaaaatcgcgccgaaggatgtcgctgccgactgggcaatggagcgcctgccggcccagtatcagcccgtcatacttgaagctagacaggcttatcttggacaagaagaagatcgcttggcctcgcgcgcagatcagttggaagaatttgtccactacgtgaaaggcgagatcaccaaggtagtcggcaaataaggatcaattcccgatcgttcaaacatttggcaataaagtttcttaagattgaatcctgttgccggtcttgcgatgattatcatataatttctgttgaattacgttaagcatgtaataattaacatgtaatgcatgacgttatttatgagatgggtttttatgattagagtcccgcaattatacatttaatacgcgatagaaaacaaaatatagcgcgcaaactaggataaattatcgcgcgcggtgtcatctatgttactagatcggtacctacgcgtagctagcccgtgaagtttctcatctaagcccccatttggacgtgaatgtagacacgtcgaaataaagatttccgaattagaataatttgtttattgctttcgcctataaatacgacggatcgtaatttgtcgttttatcaaaatgtactttcattttataataacgctgcggacatctacatttttgaattgaaaaaaaattggtaattactctttctttttctccatattgaccatcatactcattgctgatccatgtagatttcccggacatgaagccatttacaattgaatatatcctgccgccgctgccgctttgcacccggtggagcttgcatgttggtttctacgcagaactgagccggttaggcagataatttccattgagaactgagccatgtgcaccttccccccaacacggtgagcgacggggcaacggagtgatccacatgggacttttcctagcttggctgccatttttggggtgaggccgttcgcggccgaggggcgcagcccctggggggatgggaggcccgcgttagcgggccgggagggttcgagaagggggggcaccccccttcggcgtgcgcggtcacgcgcacagggcgcagccctggttaaaaacaaggtttataaatattggtttaaaagcaggttaaaagacaggttagcggtggccgaaaaacgggcggaaacccttgcaaatgctggattttctgcctgtggacagcccctcaaatgtcaataggtgcgcccctcatctgtcagcactctgcccctcaagtgtcaaggatcgcgcccctcatctgtcagtagtcgcgcccctcaagtgtcaataccgcagggcacttatccccaggcttgtccacatcatctgtgggaaactcgcgtaaaatcaggcgttttcgccgatttgcgaggctggccagctccacgtcgccggccgaaatcgagcctgcccctcatctgtcaacgccgcgccgggtgagtcggcccctcaagtgtcaacgtccgcccctcatctgtcagtgagggccaagttttccgcgaggtatccacaacgccggcggccggccgcggtgtctcgcacacggcttcgacggcgtttctggcgcgtttgcagggccatagacggccgccagcccagcggcgagggcaaccagcccggtgagcgtcggaaagggtcgatcgaccgatgcccttgagagccttcaacccagtcagctccttccggtgggcgcggggcatgactatcgtcgccgcacttatgactgtcttctttatcatgcaactcgtaggacaggtgccggcagcgctctgggtcattttcggcgaggaccgctttcgctggagcgcgacgatgatcggcctgtcgcttgcggtattcggaatcttgcacgccctcgctcaagccttcgtcactggtcccgccaccaaacgtttcggcgagaagcaggccattatcgccggcatggcggccgacgcgctgggctacgtcttgctggcgttcgcgacgcgaggctggatggccttccccattatgattcttctcgcttccggcggcatcgggatgcccgcgttgcaggccatgctgtccaggcaggtagatgacgaccatcagggacagcttcaaggatcgctcgcggctcttaccagcctaacttcgatcattggaccgctgatcgtcacggcgatttatgccgcctcggcgagcacatggaacgggttggcatggattgtaggcgccgccctataccttgtctgcctccccgcgttgcgtcgcggtgcatggagccgggccacctcgacctgaatggaagccggcggcacctcgctaacggattcaccactccaagaattggagccaatcaattcttgcggagaactgtgaatgcgcaaaccaacccttggcagaacatatccatcgcgtccgccatctccagcagccgcacgcggcgcatctcgggcagcgttgggtcctggccacgggtgcgcatgatcgtgctcctgtcgttgaggacccggctaggctggcggggttgccttactggttagcagaatgaatcaccgatacgcgagcgaacgtgaagcgactgctgctgcaaaacgtctgcgacctgagcaacaacatgaatggtcttcggtttccgtgtttcgtaaagtctggaaacgcggaagtcagcgccctgcaccattatgttccggatctgcatcgcaggatgctgctggctaccctgtggaacacctacatctgtattaacgaagcgctggcattgaccctgagtgatttttctctggtcccgccgcatccataccgccagttgtttaccctcacaacgttccagtaaccgggcatgttcatcatcagtaacccgtatcgtgagcatcctctctcgtttcatcggtatcattacccccatgaacagaaatcccccttacacggaggcatcagtgaccaaacaggaaaaaaccgcccttaacatggcccgctttatcagaagccagacattaacgcttctggagaaactcaacgagctggacgcggatgaacaggcagacatctgtgaatcgcttcacgaccacgctgatgagctttaccgcagctgcctcgcgcgtttcggtgatgacggtgaaaacctctgacacatgcagctcccggagacggtcacagcttgtctgtaagcggatgccgggagcagacaagcccgtcagggcgcgtcagcgggtgttggcgggtgtcggggcgcagccatgacccagtcacgtagcgatagcggagtgtatactggcttaactatgcggcatcagagcagattgtactgagagtgcaccatatgcggtgtgaaataccgcacagatgcgtaaggagaaaataccgcatcaggcgctcttccgcttcctcgctcactgactcgctgcgctcggtcgttcggctgcggcgagcggtatcagctcactcaaaggcggtaatacggttatccacagaatcaggggataacgcaggaaagaacatgtgagcaaaaggccagcaaaaggccaggaaccgtaaaaaggccgcgttgctggcgtttttccataggctccgcccccctgacgagcatcacaaaaatcgacgctcaagtcagaggtggcgaaacccgacaggactataaagataccaggcgtttccccctggaagctccctcgtgcgctctcctgttccgaccctgccgcttaccggatacctgtccgcctttctcccttcgggaagcgtggcgctttctcatagctcacgctgtaggtatctcagttcggtgtaggtcgttcgctccaagctgggctgtgtgcacgaaccccccgttcagcccgaccgctgcgccttatccggtaactatcgtcttgagtccaacccggtaagacacgacttatcgccactggcagcagccactggtaacaggattagcagagcgaggtatgtaggcggtgctacagagttcttgaagtggtggcctaactacggctacactagaaggacagtatttggtatctgcgctctgctgaagccagttaccttcggaaaaagagttggtagctcttgatccggcaaacaaaccaccgctggtagcggtggtttttttgtttgcaagcagcagattacgcgcagaaaaaaaggatctcaagaagatcctttgatcttttctacggggtctgacgctcagtggaacgaaaactcacgttaagggattttggtcatgagattatcaaaaaggatcttcacctagatccttttaaattaaaaatgaagttttaaatcaatctaaagtatatatgagtaaacttggtctgacagttaccaatgcttaatcagtgaggcacctatctcagcgatctgtctatttcgttcatccatagttgcctgactccccgtcgtgtagataactacgatacgggagggcttaccatctggccccagtgctgcaatgataccgcgagacccacgctcaccggctccagatttatcagcaataaaccagccagccggaagggccgagcgcagaagtggtcctgcaactttatccgcctccatccagtctattaattgttgccgggaagctagagtaagtagttcgccagttaatagtttgcgcaacgttgttgccattgctgcaggtcgggagcacaggatgacgcctaacaattcattcaagccgacaccgcttcgcggcgcggcttaattcaggagttaaacatcatgagggaagcggtgatcgccgaagtatcgactcaactatcagaggtagttggcgtcatcgagcgccatctcgaaccgacgttgctggccgtacatttgtacggctccgcagtggatggcggcctgaagccacacagtgatattgatttgctggttacggtgaccgtaaggcttgatgaaacaacgcggcgagctttgatcaacgaccttttggaaacttcggcttcccctggagagagcgagattctccgcgctgtagaagtcaccattgttgtgcacgacgacatcattccgtggcgttatccagctaagcgcgaactgcaatttggagaatggcagcgcaatgacattcttgcaggtatcttcgagccagccacgatcgacattgatctggctatcttgctgacaaaagcaagagaacatagcgttgccttggtaggtccagcggcggaggaactctttgatccggttcctgaacaggatctatttgaggcgctaaatgaaaccttaacgctatggaactcgccgcccgactgggctggcgatgagcgaaatgtagtgcttacgttgtcccgcatttggtacagcgcagtaaccggcaaaatcgcgccgaaggatgtcgctgccgactgggcaatggagcgcctgccggcccagtatcagcccgtcatacttgaagctaggcaggcttatcttggacaagaagatcgcttggcctcgcgcgcagatcagttggaagaatttgttcactacgtgaaaggcgagatcaccaaggtagtcggcaaataatgtctaacaattcgttcaagccgacgccgcttcgcggcgcggcttaactcaagcgttagatgctgcaggcatcgtggtgtcacgctcgtcgtttggtatggcttcattcagctccggttcccaacgatcaaggcgagttacatgatcccccatgttgtgcaaaaaagcggttagctccttcggtcctccgatcgaggatttttcggcgctgcgctacgtccgcgaccgcgttgagggatcaagccacagcagcccactcgaccttctagccgacccagacgagccaagggatctttttggaatgctgctccgtcgtcaggctttccgacgtttgggtggttgaacagaagtcattatcgcacggaatgccaagcactcccgaggggaaccctgtggttggcatgcacatacaaatggacgaacggataaaccttttcacgcccttttaaatatccgattattctaataaacgctcttttctcttaggtttacccgccaatatatcctgtcaaacactgatagtttaaactgaaggcgggaaacgacaatctggcgcgccactgttaataatttttaaacgtcagcgcactaaaaaaacgaaaagacggacacgtgaaaataaaaaacacacactagtttatgacgcaatactattttacttatgatttgggtacattagacaaaaccgtgaaagagatgtatcagctatgaaacctgtatacttcaatacagagacttactcatatcggatacgtacgcacgaagtatcatattaattattttaatttttaataaatattttatcggatacttatgtgatactctacatatacacaaggatatttctaagatactttatagatacgtatcctagaaaaacatgaagagtaaaaaagtgagacaatgttgtaaaaattcattataaatgtatatgattcaattttagatatgcatcagtataattgattctcgatgaaacacttaaaattatatttcttgtggaagaacgtagcgagagaggtgattcagttagacaacattaaataaaattaatgttaagttcttttaatgatgtttctctcaatatcacatcatatgaaaatgtaatatgatttataagaaaatttttaaaaaatttattttaataatcacatgtactattttttaaaaattgtatcttttataataatacaataataaagagtaatcagtgttaatttttcttcaaatataagttttattataaatcattgttaacgtatcataagtcattaccgtatcgtatcttaatttttttttaaaaaccgctaattcacgtacccgtattgtattgtacccgcacctgtatcacaatcgatcttagttagaagaattgtctcgaggcggtgcaagacagcatataatagacgtggactctcttataccaaacgttgtcgtatcacaaagggttaggtaacaagtcacagtttgtccacgtgtcacgttttaattggaagaggtgccgttggcgtaatataacagccaatcgatttttgctataaaagcaaatcaggtaaactaaacttcttcattcttttcttccccatcgctacaaaaccggttcctttggaaaagagattcattcaaacctagcacccaattccgtttcaaggtataatctactttctattcttcgattattttattattattagctactatcgtttaatcgatcttttcttttgatccgtcaaatttaaattcaattagggttttgttcttttctttcatctgattgaaatccttctgaattgaaccgtttacttgattttactgtttattgtatgatttaatcctttgtttttcaaagacagtctttagattgtgattaggggttcatataaatttttagatttggatttttgtattgtatgattcaaaaaatacgtcctttaattagattagtacatggatattttttacccgatttattgattgtcagggagaatttgatgagcaagtttttttgatgtctgttgtaaattgaattgattataattgctgatctgctgcttccagttttcataacccatattcttttaaccttgttgtacacacaatgaaaaattggtgattgattcatttgtttttctttgttttggattatacagggtatggcgaactctactatcaaaattgcaacaaggaaataccttgggaagcaaaatgtttatgatattggtgtggaaagagaccataattttgctttgaagaatggatttatagcctcaaattgtttcaacggctcctccgagacaccaggcacctccgagagcgcgacgcccgagggcggctccggcggctccggcagctccaagctggagaagtttacaaactgttacagcctctccaaaaccctcaggtttaaagcgatcccggtgggcaagacccaggagaacatcgacaacaagaggctcctggtggaagacgagaagcgcgccgaagactacaagggcgtgaagaagctgctcgataggtactacctcagctttattaacgacgtgctgcacagcatcaaactcaagaatctcaacaactacatctccctcttccgcaaaaagacccgcaccgagaaggagaacaaggagctggagaacctggagatcaacctccgcaaggaaatcgccaaagcgttcaagggcaatgaagggtacaagagcctcttcaagaaagacatcatcgaaactatcctcccagagtttctcgatgacaaggacgagatcgcgctggtgaactcctttaacgggttcacaaccgcgtttaccggcttctttgataacagggaaaatatgttctccgaggaggccaagtccaccagcatcgccttcaggtgtatcaacgagaacctcacccgctacatttccaatatggacattttcgagaaggtggatgcgatcttcgataagcacgaggtgcaggagatcaaagagaagattctcaattccgattatgacgtcgaggatttcttcgaaggggagttctttaattttgtgctcacacaagagggcattgacgtgtacaacgcgattatcgggggcttcgtcacagagtccggggagaagattaaggggctgaatgagtacatcaatctgtacaatcagaagaccaagcagaaactgccgaaattcaagccgctctacaagcaagtcctgtccgatagggaaagcctctccttctacggcgagggctataccagcgacgaggaggtgctggaagtcttccgcaacacactgaataagaatagcgagattttctcctccatcaagaagctcgagaagctctttaagaactttgacgagtacagctccgccgggattttcgtgaagaacgggccggcgatcagcaccatctccaaggacatctttggcgagtggaacgtcatcagggacaagtggaacgccgagtacgacgacatccacctgaagaagaaggcggtggtgaccgagaagtatgaggacgatcgcaggaagtccttcaaaaaaatcggctccttcagcctcgaacagctccaggagtatgccgatgcggatctgtccgtcgtcgagaagctgaaggaaatcatcattcagaaggtcgacgagatctataaagtgtacgggtccagcgagaagctgttcgacgccgactttgtgctcgagaagtccctcaaaaagaatgacgccgtggtggccattatgaaagacctgctcgactccgtgaagtccttcgaaaattacattaaagcgttctttggggaggggaaggaaactaacagggatgagtccttctatggcgactttgtcctcgcgtacgacatcctgctgaaggtcgaccacatttacgacgcgatccgcaactacgtgacacagaagccgtactccaaagacaagttcaagctgtacttccagaacccgcaatttatggggggctgggacaaggataaagagacagactaccgcgcgacaattctccgctatggctccaaatactatctggccatcatggacaagaagtacgcgaagtgcctgcagaagatcgacaaagacgacgtcaatggcaactatgaaaagatcaactacaagctgctgccgggtccgaacaagatgctcccgaaggtgttcttcagcaagaagtggatggcctactacaatccaagcgaggatattcagaaaatctataaaaacgggaccttcaagaagggggacatgtttaacctcaacgactgccacaagctcattgatttcttcaaggatagcatttcccgctacccgaaatggtccaatgcgtacgattttaacttctccgagacagaaaagtacaaagacatcgcgggcttttacagggaggtggaggagcaagggtataaagtttcttttgaatccgcgagcaagaaggaagtcgacaagctcgtcgaggagggcaagctctacatgttccaaatttataacaaggacttttccgacaagagccatgggaccccaaacctccacaccatgtacttcaaactgctctttgacgagaacaaccacgggcaaatcaggctgagcggcggcgccgaattattcatgcgcagggcctccctcaagaaggaagagctggtcgtccatccagccaattccccgatcgcgaacaagaacccggacaatccgaaaaagaccaccaccctgtcctacgacgtctacaaggacaaacgcttcagcgaagaccagtacgaattacacatcccaattgcgattaataagtgcccaaagaatatcttcaaaattaatacagaggtcagggtgctgctcaaacacgacgacaatccgtatgtcatcggcattgacaggggcgagcgcaatctgctctatatcgtggtcgtggatgggaagggcaatattgtggagcagtactccctgaacgagattatcaacaacttcaatgggattaggattaagaccgactatcacagcctgctcgacaagaaagaaaaagagaggtttgaggcccgccaaaactggacctccattgagaatatcaaagaattaaaggccggctatatttcccaagtcgtccacaagatctgcgagctggtggagaaatatgacgccgtgattgcgctcgaagacttaaattctgggttcaagaactcccgcgtgaaggtggaaaaacaggtgtatcagaaattcgagaaaatgctgatcgacaaactcaattatatggtggataagaagtccaacccgtgtgccacagggggcgcgctgaagggctatcagatcaccaacaagttcgagagcttcaagagcatgagcacccagaacgggtttattttctacatcccggcgtggctcacctccaagattgacccgagcaccggcttcgtgaacctcctgaagacaaagtatacctccattgccgacagcaagaagtttatctcctccttcgaccgcattatgtatgtgccggaggaggacctcttcgagttcgccctcgactacaaaaacttcagccgcacagatgcggattacatcaagaagtggaagctgtactcctacgggaacaggatccgcatcttcaggaatccaaaaaaaaataacgtctttgactgggaggaagtgtgcctgacatccgcctacaaggaactgttcaataaatacggcatcaattaccagcagggcgacattcgcgccctcctctgtgagcagtccgacaaagcgttttactccagcttcatggccctcatgtccctgatgctccaaatgaggaatagcatcacagggcgcaccgacgtcgacttcctcatcagcccggtgaagaactccgacgggatcttttacgactcccgcaactatgaggcgcaagagaatgcgatcctcccgaagaacgccgatgcgaacggggcctataatatcgccaggaaagtgctctgggccatcgggcagttcaaaaaggcggaggatgagaagctcgacaaggtgaaaattgccatttccaacaaggagtggctggagtacgcgcagacctccgtgaagcactgaaagggctctctgtcatgatttcatactttcattattgagctctgtaattacaattatgaccatgagaacatctcttattgtgtggccttttaattgctgatgttagtactgaaccaaagcttatcgtgatgatgtaaaagcaataagtacttgtttgtagcttctttgtgtctccctttgggcttaatacatctgtttagtgttgtggctttggcatagacttctcttggtaataatgccttgcaatgcaaaatttcaattatcaaattctattatgttctcaccttatggtaacagcttaccctgtggaagatgagattcttgagttgagtcattgccaatttttggcattagcttttgaattagtgaattttgacaaaaattaccgtgacactgattttgttgaagctcttaagtgtagtttttacaaaatttcagtggctcgttgtgattatgtcaaactcacggcgaatgtagttcttacagaatttcagtggctccctgcaggatcccaatggcgcgcctagctaactagctagccacgtgactcgcagaacgttgtgtggcgagacggaaagaaagtcacgcctccaaagagtgcagcatctcttctggctctcacggtcctctgtggatccatcgatatcgaattcctgcaggctcgaggtcattcatatgcttgagaagagagtcgggatagtccaaaataaaacaaaggtaagattacctggtcaaaagtgaaaacatcagttaaaaggtggtataaagtaaaatatcggtaataaaaggtggcccaaagtgaaatttactcttttctactattataaaaattgaggatgtttttgtcggtactttgatacgtcatttttgtatgaattggtttttaagtttattcgcttttggaaatgcatatctgtatttgagtcgggttttaagttcgtttgcttttgtaaatacagagggatttgtataagaaatatctttagaaaaacccatatgctaatttgacataatttttgagaaaaatatatattcaggcgaattctcacaatgaacaataataagattaaaatagctttcccccgttgcagcgcatgggtattttttctagtaaaaataaaagataaacttagactcaaaacatttacaaaaacaacccctaaagttcctaaagcccaaagtgctatccacgatccatagcaagcccagcccaacccaacccaacccaacccaccccagtccagccaactggacaatagtctccacacccccccactatcaccgtgagttgtccgcacgcaccgcacgtctcgcagccaaaaaaaaaaagaaagaaaaaaaagaaaaagaaaaaacagcaggtgggtccgggtcgtgggggccggaaacgcgaggaggatcgcgagccagcgacgaggagcttaggcctcatcgttgaagatgcctctgccgacagtggtcccaaagatggacccccacccacgaggagcatcgtggaaaaagaagacgttccaaccacgtcttcaaagcaagtggattgatgtgatatctccactgacgtaagggatgacgcacaatcccactatccttcgaggcctcatcgttgaagatgcctctgccgacagtggtcccaaagatggacccccacccacgaggagcatcgtggaaaaagaagacgttccaaccacgtcttcaaagcaagtggattgatgtgatatctccactgacgtaagggatgacgcacaatcccactatccttcgaagctccctccctccgcttccaaagaaacgccccccatcgccactatatacatacccccccctctcctcccatccccccaacccttctagaaccatcttccacacactcaagccacactattggagaacacacagggacaacacaccataagatccaagggaggcctccgccgccgccggtaaccaccccgcccctctcctctttctttctccgtttttttttccgtctcggtctcgatctttggccttggtagtttgggtgggcgagaggcggcttcgtgcgcgcccagatcggtgcgcgggaggggcgggatctcgcggctggggctctcgccggcgtggatccggcccggatctcgcggggaatggggctctcggatgtagatctgcgatccgccgttgttgggggagatgatggggggtttaaaatttccgccgtgctaaacaagatcaggaagaggggaaaagggcactatggtttatatttttatatatttctgctgcttcgtcaggcttagatgtgctagatctttctttcttctttttgtgggtagaatttgaatccctcagcattgttcatcggtagtttttcttttcatgatttgtgacaaatgcagcctcgtgcggagcttttttgtaggtagaaggcggccgcatggcccagtctaagcacgggttgacgaaggagatgactatgaagtatcgcatggaaggctgcgttgacggccacaaattcgtcattaccggcgagggcatcggctacccctttaaggtaagtttctgcttctacctttgatatatatataataattatcattaattagtagtaatataatatttcaaatatttttttcaaaataaaagaatgtagtatatagcaattgcttttctgtagtttataagtgtgtatattttaatttataacttttctaatatatgaccaaaatttgttgatgtgcagggcaagcaagcgataaacctgtgcgtggtggagggtggccctctgcccttcgccgaggatatactctcagccgccttcatgtacgggaatcgggtgttcacggagtacccgcaagacatcgtggactacttcaagaactcctgccccgccggatacacatgggaccgttccttcctcttcgaggacggagccgtttgcatctgcaacgcggacatcaccgtgtccgtcgaggagaactgcatgtaccacgagtcaaagttctatggagtgaacttcccggccgatggtcccgtgatgaagaaaatgacggacaactgggagccgtcgtgcgagaaaatcattcccgtcccaaaacagggaatcctcaagggcgacgtgtcgatgtacctacttctcaaggacggtggacggctacggtgccagttcgacactgtttacaaggcgaagtcggtgccgaggaagatgccggactggcactttatccagcacaagctgacaagggaggacagaagcgacgctaagaaccagaaatggcacctcaccgagcacgccatcgccagtggctctgcgctgcccgggtgaccctgcaatgtgaccctagacttgtccatcttctggattggccaacttaattaatgtatgaaataaaaggatgcacacatagtgacatgctaatcactataatgtgggcatcaaagttgtgtgttatgtgtaattactaattatctgaataagagaaagagatcatccatatttcttatcctaaatgaatgtcacgtgtctttataattctttgatgaaccagatgcattttattaaccaattccatatacatataaatattaatcatatataattaatatcaattgggttagcaaaacaaatctagtctaggtgtgttttgctaattattgggggatagtgcaaaaagaaatctacgttctcaataattcagatagaaaacttaataaagtgagataatttacatagattgcttttatcctttgatatatgtgaaaccatgcatgatataaggaaaatagatagagaaataattttttacatcgttgaatatgtaaacaatttaattcaagaagctaggaatataaatattgaggagtttatgattattattattattttgatgttcaatgaagttttttttaatttcatatgaagtatacaaaaattcttcatagatttttgtttctatgccgtagttatctttaatatatttgtggttgaagaaatttattgctagaaacgaatggattgtcaatttttttttaaagcaaatatatatgaaattatactgtatattattttagtcatgattaaaatgtggccttaattgaatcatctttctcattcattttttcaaaagcatatcaggatgattgatatttatctattttaaaaattaatttaagggttcaaattaaatttaacttaaaagtgtcctaaccgtagttaaaggtttactttaaaaaaatactatgaaaaatctaatcttctatgaatcgagggcccggccgtgacggccacgagcgaactcctgcaggcgataaaaatgttttaaacgatatatattataaaaaaaaacgtttcaaaaataaatacaaaaatgtttttaaatatatataatttaactcattaaagaaaataaaaatgcaagtgcggtgacaagacaagctaaaagttgcaaaagaaatggcagggctataaggctcacctactcctggatttaccaaattttggttcgtccctatactcgaaaaataaaacaaaataaatttcagtatcttcgtttttgtatgctttgactgtgaggcgaggccaactttcttcttctgtctgagatgaattttgtttgcctcctgtgaaggatgtatcattcaaagtgaatgttttgcaactgccagtagtcccacatcgaccaaatattcttattacagtgtgtttatatagcacctggagaaggaatgggttgtttcaaagattaaataatttctactaagtgtagattgccgttaatttgagagtccaagtaatttctactaagtgtagatttttttttgcggccgcacaacaaacgcgccggcga

SEQ ID NO: 135 - DNA, 18232 bp, synthetic construct
  misc_feature 1..18232: note = pWISE3088 Full Plasmid Sequence
  source 1..18232: mol_type = other DNA
agcttactagtcaacaattggccaatctttgttctaaattgctaataaacgaccatttccgtcaattctccttggttgcaacagtctacccgtcaaatgtttactaatttataagtgtgaagtttgaattatgaaagacgaaatcgtattaaaaattcacaagaataaacaactccatagattttcaaaaaaacagtcacgagaaaaaaaccacagtccgtttgtctgctcttctagtttttattatttttctattaatagttttttgttatttcgagaataaaatttgaacgatgtccgaaccacaaaagccgagccgataaatcctaagccgagcctaactttagccgtaaccatcagtcacggctcccgggctaattcatttgaaccgaatcataatcaacggtttagatcaaactcaaaacaatctaacggcaacatagacgcgtcggtgagctaaaaagagtgtgaaagccaggtcaccatagcattgtctctcccagattttttatttgggaaataatagaagaaatagaaaaaaataaaagagtgagaaaaatcgtagagctatatattcgcacatgtactcgtttcgctttccttagtgttagctgctgccgctgttgtttctcctccatttctctatctttctctctcgctgcttctcgaatcttctgtatcatcttcttcttcttcaaggtgagtctctagatccgttcgcttgattttgctgctcgttagtcgttattgttgattctctatgccgatttcgctagatctgtttagcatgcgttgtggttttatgagaaaatctttgttttgggggttgcttgttatgtgattcgatccgtgcttgttggatcgatctgagctaattcttaaggtttatgtgttagatctatggagtttgaggattcttctcgcttctgtcgatctctcgctgttatttttgtttttttcagtgaagtgaagttgtttagttcgaaatgacttcgtgtatgctcgattgatctggttttaatcttcgatctgttaggtgttgatgtttacaagtgaattctagtgttttctcgttgagatctgtgaagtttgaacctagttttctcaataatcaacatatgaagcgatgtttgagtttcaataaacgctgctaatcttcgaaactaagttgtgatctgattcgtgtttacttcatgagcttatccaattcatttcggtttcattttactttttttttagtgaaccatggcgcaagttagcagaatctgcaatggtgtgcagaacccatctcttatctccaatctctcgaaatccagtcaacgcaaatctcccttatcggtttctctgaagacgcagcagcatccacgagcttatccgatttcgtcgtcgtggggattgaagaagagtgggatgacgttaattggctctgagcttcgtcctcttaaggtcatgtcttctgtttccacggcgtgcatgggggaagcggtgatcgccgaagtatcgactcaactatcagaggtagttggcgtcatcgagcgccatctcgaaccgacgttgctggccgtacatttgtacggctccgcagtggatggcggcctgaagccacacagtgatattgatttgctggttacggtgaccgtaaggcttgatgaaacaacgcggcgagctttgatcaacgaccttttggaaacttcggcttcccctggagagagcgagattctccgcgctgtagaagtcaccattgttgtgcacgacgacatcattccgtggcgttatccagctaagcgcgaactgcaatttggagaatggcagcgcaatgacattcttgcaggtatcttcgagccagccacgatcgacattgatctggctatcttgctgacaaaagcaagagaacatagcgttgccttggtaggtccagcggcggaggaactctttgatccggttcctgaacaggatctatttgaggcgctaaatgaaaccttaacgctatggaactcgccgcccgactgggctggcgatgagcgaaatgtagtgcttacgttgtcccgcatttggtacagcgcagtaaccggcaaaatcgcgccgaaggatgtcgctgccgactgggcaatggagcgcctgccggcccagtatcagcccgtcatacttgaagctagacaggcttatcttggacaagaagaagatcgcttggcctcgcgcgcagatcagttggaagaatttgtccactacgtgaaaggcgagatcaccaaggtagtcggcaaataaggatcaattcccgatcgttcaaacatttggcaataaagtttcttaagattgaatcctgttgccggtcttgcgatgattatcatataatttctgttgaattacgttaagcatgtaataattaacatgtaatgcatgacgttatttatgagatgggtttttatgattagagtcccgcaattatacatttaatacgcgatagaaaacaaaatatagcgcgcaaactaggataaattatcgcgcgcggtgtcatctatgttactagatcggtacctacgcgtagctagcccgtgaagtttctcatctaagcccccatttggacgtgaatgtagacacgtcgaaataaagatttccgaattagaataatttgtttattgctttcgcctataaatacgacggatcgtaatttgtcgttttatcaaaatgtactttcattttataataacgctgcggacatctacatttttgaattgaaaaaaaattggtaattactctttctttttctccatattgaccatcatactcattgctgatccatgtagatttcccggacatgaagccatttacaattgaatatatcctgccgccgctgccgctttgcacccggtggagcttgcatgttggtttctacgcagaactgagccggttaggcagataatttccattgagaactgagccatgtgcaccttccccccaacacggtgagcgacggggcaacggagtgatccacatgggacttttcctagcttggctgccatttttggggtgaggccgttcgcggccgaggggcgcagcccctggggggatgggaggcccgcgttagcgggccgggagggttcgagaagggggggcaccccccttcggcgtgcgcggtcacgcgcacagggcgcagccctggttaaaaacaaggtttataaatattggtttaaaagcaggttaaaagacaggttagcggtggccgaaaaacgggcggaaacccttgcaaatgctggattttctgcctgtggacagcccctcaaatgtcaataggtgcgcccctcatctgtcagcactctgcccctcaagtgtcaaggatcgcgcccctcatctgtcagtagtcgcgcccctcaagtgtcaataccgcagggcacttatccccaggcttgtccacatcatctgtgggaaactcgcgtaaaatcaggcgttttcgccgatttgcgaggctggccagctccacgtcgccggccgaaatcgagcctgcccctcatctgtcaacgccgcgccgggtgagtcggcccctcaagtgtcaacgtccgcccctcatctgtcagtgagggccaagttttccgcgaggtatccacaacgccggcggccggccgcggtgtctcgcacacggcttcgacggcgtttctggcgcgtttgcagggccatagacggccgccagcccagcggcgagggcaaccagcccggtgagcgtcggaaagggtcgatcgaccgatgcccttgagagccttcaacccagtcagctccttccggtgggcgcggggcatgactatcgtcgccgcacttatgactgtcttctttatcatgcaactcgtaggacaggtgccggcagcgctctgggtcattttcggcgaggaccgctttcgctggagcgcgacgatgatcggcctgtcgcttgcggtattcggaatcttgcacgccctcgctcaagccttcgtcactggtcccgccaccaaacgtttcggcgagaagcaggccattatcgccggcatggcggccgacgcgctgggctacgtcttgctggcgttcgcgacgcgaggctggatggccttccccattatgattcttctcgcttccggcggcatcgggatgcccgcgttgcaggccatgctgtccaggcaggtagatgacgaccatcagggacagcttcaaggatcgctcgcggctcttaccagcctaacttcgatcattggaccgctgatcgtcacggcgatttatgccgcctcggcgagcacatggaacgggttggcatggattgtaggcgccgccctataccttgtctgcctccccgcgttgcgtcgcggtgcatggagccgggccacctcgacctgaatggaagccggcggcacctcgctaacggattcaccactccaagaattggagccaatcaattcttgcggagaactgtgaatgcgcaaaccaacccttggcagaacatatccatcgcgtccgccatctccagcagccgcacgcggcgcatctcgggcagcgttgggtcctggccacgggtgcgcatgatcgtgctcctgtcgttgaggacccggctaggctggcggggttgccttactggttagcagaatgaatcaccgatacgcgagcgaacgtgaagcgactgctgctgcaaaacgtctgcgacctgagcaacaacatgaatggtcttcggtttccgtgtttcgtaaagtctggaaacgcggaagtcagcgccctgcaccattatgttccggatctgcatcgcaggatgctgctggctaccctgtggaacacctacatctgtattaacgaagcgctggcattgaccctgagtgatttttctctggtcccgccgcatccataccgccagttgtttaccctcacaacgttccagtaaccgggcatgttcatcatcagtaacccgtatcgtgagcatcctctctcgtttcatcggtatcattacccccatgaacagaaatcccccttacacggaggcatcagtgaccaaacaggaaaaaaccgcccttaacatggcccgctttatcagaagccagacattaacgcttctggagaaactcaacgagctggacgcggatgaacaggcagacatctgtgaatcgcttcacgaccacgctgatgagctttaccgcagctgcctcgcgcgtttcggtgatgacggtgaaaacctctgacacatgcagctcccggagacggtcacagcttgtctgtaagcggatgccgggagcagacaagcccgtcagggcgcgtcagcgggtgttggcgggtgtcggggcgcagccatgacccagtcacgtagcgatagcggagtgtatactggcttaactatgcggcatcagagcagattgtactgagagtgcaccatatgcggtgtgaaataccgcacagatgcgtaaggagaaaataccgcatcaggcgctcttccgcttcctcgctcactgactcgctgcgctcggtcgttcggctgcggcgagcggtatcagctcactcaaaggcggtaatacggttatccacagaatcaggggataacgcaggaaagaacatgtgagcaaaaggccagcaaaaggccaggaaccgtaaaaaggccgcgttgctggcgtttttccataggctccgcccccctgacgagcatcacaaaaatcgacgctcaagtcagaggtggcgaaacccgacaggactataaagataccaggcgtttccccctggaagctccctcgtgcgctctcctgttccgaccctgccgcttaccggatacctgtccgcctttctcccttcgggaagcgtggcgctttctcatagctcacgctgtaggtatctcagttcggtgtaggtcgttcgctccaagctgggctgtgtgcacgaaccccccgttcagcccgaccgctgcgccttatccggtaactatcgtcttgagtccaacccggtaagacacgacttatcgccactggcagcagccactggtaacaggattagcagagcgaggtatgtaggcggtgctacagagttcttgaagtggtggcctaactacggctacactagaaggacagtatttggtatctgcgctctgctgaagccagttaccttcggaaaaagagttggtagctcttgatccggcaaacaaaccaccgctggtagcggtggtttttttgtttgcaagcagcagattacgcgcagaaaaaaaggatctcaagaagatcctttgatcttttctacggggtctgacgctcagtggaacgaaaactcacgttaagggattttggtcatgagattatcaaaaaggatcttcacctagatccttttaaattaaaaatgaagttttaaatcaatctaaagtatatatgagtaaacttggtctgacagttaccaatgcttaatcagtgaggcacctatctcagcgatctgtctatttcgttcatccatagttgcctgactccccgtcgtgtagataactacgatacgggagggcttaccatctggccccagtgctgcaatgataccgcgagacccacgctcaccggctccagatttatcagcaataaaccagccagccggaagggccgagcgcagaagtggtcctgcaactttatccgcctccatccagtctattaattgttgccgggaagctagagtaagtagttcgccagttaatagtttgcgcaacgttgttgccattgctgcaggtcgggagcacaggatgacgcctaacaattcattcaagccgacaccgcttcgcggcgcggcttaattcaggagttaaacatcatgagggaagcggtgatcgccgaagtatcgactcaactatcagaggtagttggcgtcatcgagcgccatctcgaaccgacgttgctggccgtacatttgtacggctccgcagtggatggcggcctgaagccacacagtgatattgatttgctggttacggtgaccgtaaggcttgatgaaacaacgcggcgagctttgatcaacgaccttttggaaacttcggcttcccctggagagagcgagattctccgcgctgtagaagtcaccattgttgtgcacgacgacatcattccgtggcgttatccagctaagcgcgaactgcaatttggagaatggcagcgcaatgacattcttgcaggtatcttcgagccagccacgatcgacattgatctggctatcttgctgacaaaagcaagagaacatagcgttgccttggtaggtccagcggcggaggaactctttgatccggttcctgaacaggatctatttgaggcgctaaatgaaaccttaacgctatggaactcgccgcccgactgggctggcgatgagcgaaatgtagtgcttacgttgtcccgcatttggtacagcgcagtaaccggcaaaatcgcgccgaaggatgtcgctgccgactgggcaatggagcgcctgccggcccagtatcagcccgtcatacttgaagctaggcaggcttatcttggacaagaagatcgcttggcctcgcgcgcagatcagttggaagaatttgttcactacgtgaaaggcgagatcaccaaggtagtcggcaaataatgtctaacaattcgttcaagccgacgccgcttcgcggcgcggcttaactcaagcgttagatgctgcaggcatcgtggtgtcacgctcgtcgtttggtatggcttcattcagctccggttcccaacgatcaaggcgagttacatgatcccccatgttgtgcaaaaaagcggttagctccttcggtcctccgatcgaggatttttcggcgctgcgctacgtccgcgaccgcgttgagggatcaagccacagcagcccactcgaccttctagccgacccagacgagccaagggatctttttggaatgctgctccgtcgtcaggctttccgacgtttgggtggttgaacagaagtcattatcgcacggaatgccaagcactcccgaggggaaccctgtggttggcatgcacatacaaatggacgaacggataaaccttttcacgcccttttaaatatccgattattctaataaacgctcttttctcttaggtttacccgccaatatatcctgtcaaacactgatagtttaaactgaaggcgggaaacgacaatctggcgcgccattgggatcctgcagggagccactgaaattctgtaagaactacattcgccgtgagtttgacataatcacaacgagccactgaaattttgtaaaaactacacttaagagcttcaacaaaatcagtgtcacggtaatttttgtcaaaattcactaattcaaaagctaatgccaaaaattggcaatgactcaactcaagaatctcatcttccacagggtaagctgttaccataaggtgagaacataatagaatttgataattgaaattttgcattgcaaggcattattaccaagagaagtctatgccaaagccacaacactaaacagatgtattaagcccaaagggagacacaaagaagctacaaacaagtacttattgcttttacatcatcacgataagctttggttcagtactaacatcagcaattaaaaggccacacaataagagatgttctcatggtcataattgtaattacagagctcaataatgaaagtatgaaatcatgacagagagccctttcagtgcttcacggaggtctgcgcgtactccagccactccttgttggaaatggcaattttcaccttgtcgagcttctcatcctccgcctttttgaactgcccgatggcccagagcactttcctggcgatattataggccccgttcgcatcggcgttcttcgggaggatcgcattctcttgcgcctcatagttgcgggagtcgtaaaagatcccgtcggagttcttcaccgggctgatgaggaagtcgacgtcggtgcgccctgtgatgctattcctcatttggagcatcagggacatgagggccatgaagctggagtaaaacgctttgtcggactgctcacagaggagggcgcgaatgtcgccctgctggtaattgatgccgtatttattgaacagttccttgtaggcggatgtcaggcacacttcctcccagtcaaagacgttatttttttttggattcctgaagatgcggatcctgttcccgtaggagtacagcttccacttcttgatgtaatccgcatctgtgcggctgaagtttttgtagtcgagggcgaactcgaagaggtcctcctccggcacatacataatgcggtcgaaggaggagataaacttcttgctgtcggcaatggaggtatactttgtcttcaggaggttcacgaagccggtgctcgggtcaatcttggaggtgagccacgccgggatgtagaaaataaacccgttctgggtgctcatgctcttgaagctctcgaacttgttggtgatctgatagcccttcagcgcgccccctgtggcacacgggttggacttcttatccaccatataattgagtttgtcgatcagcattttctcgaatttctgatacacctgtttttccaccttcacgcgggagttcttgaacccagaatttaagtcttcgagcgcaatcacggcgtcatatttctccaccagctcgcagatcttgtggacgacttgggaaatatagccggcctttaattctttgatattctcaatggaggtccagttttggcgggcctcaaacctctctttttctttcttgtcgagcaggctgtgatagtcggtcttaatcctaatcccattgaagttgttgataatctcgttcagggagtactgctccacaatattgcccttcccatccacgaccacgatatagagcagattgcgctcgcccctgtcaatgccgatgacatacggattgtcgtcgtgtttgagcagcaccctgacctctgtattaattttgaagatattctttgggcacttattaatcgcaattgggatgtgtaattcgtactggtcttcgctgaagcgtttgtccttgtagacgtcgtaggacagggtggtggtctttttcggattgtccgggttcttgttcgcgatcggggaattggctggatggacgaccagctcttccttcttgagggaggccctgcgcatgaataattcggcgccgccgctcagcctgatttgcccgtggttgttctcgtcaaagagcagtttgaagtacatggtgtggaggtttggggtcccatggctcttgtcggaaaagtccttgttataaatttggaacatgtagagcttgccctcctcgacgagcttgtcgacttccttcttgctcgcggattcaaaagaaactttatacccttgctcctccacctccctgtaaaagcccgcgatgtctttgtacttttctgtctcggagaagttaaaatcgtacgcattggaccatttcgggtagcgggaaatgctatccttgaagaaatcaatgagcttgtggcagtcgttgaggttaaacatgtcccccttcttgaaggtcccgtttttatagattttctgaatatcctcgcttggattgtagtaggccatccacttcttgctgaagaacaccttcgggagcatcttgttcggacccggcagcagcttgtagttgatcttttcatagttgccattgacgtcgtctttgtcgatcttctgcaggcacttcgcgtacttcttgtccatgatggccagatagtatttggagccatagcggagaattgtcgcgcggtagtctgtctctttatccttgtcccagccccccataaattgcgggttctggaagtacagcttgaacttgtctttggagtacggcttctgtgtcacgtagttgcggatcgcgtcgtaaatgtggtcgaccttcagcaggatgtcgtacgcgaggacaaagtcgccatagaaggactcatccctgttagtttccttcccctccccaaagaacgctttaatgtaattttcgaaggacttcacggagtcgagcaggtctttcataatggccaccacggcgtcattctttttgagggacttctcgagcacaaagtcggcgtcgaacagcttctcgctggacccgtacactttatagatctcgtcgaccttctgaatgatgatttccttcagcttctcgacgacggacagatccgcatcggcatactcctggagctgttcgaggctgaaggagccgatttttttgaaggacttcctgcgatcgtcctcatacttctcggtcaccaccgccttcttcttcaggtggatgtcgtcgtactcggcgttccacttgtccctgatgacgttccactcgccaaagatgtccttggagatggtgctgatcgccggcccgttcttcacgaaaatcccggcggagctgtactcgtcaaagttcttaaagagcttctcgagcttcttgatggaggagaaaatctcgctattcttattcagtgtgttgcggaagacttccagcacctcctcgtcgctggtatagccctcgccgtagaaggagaggctttccctatcggacaggacttgcttgtagagcggcttgaatttcggcagtttctgcttggtcttctgattgtacagattgatgtactcattcagccccttaatcttctccccggactctgtgacgaagcccccgataatcgcgttgtacacgtcaatgccctcttgtgtgagcacaaaattaaagaactccccttcgaagaaatcctcgacgtcataatcggaattgagaatcttctctttgatctcctgcacctcgtgcttatcgaagatcgcatccaccttctcgaaaatgtccatattggaaatgtagcgggtgaggttctcgttgatacacctgaaggcgatgctggtggacttggcctcctcggagaacatattttccctgttatcaaagaagccggtaaacgcggttgtgaacccgttaaaggagttcaccagcgcgatctcgtccttgtcatcgagaaactctgggaggatagtttcgatgatgtctttcttgaagaggctcttgtacccttcattgcccttgaacgctttggcgatttccttgcggaggttgatctccaggttctccagctccttgttctccttctcggtgcgggtctttttgcggaagagggagatgtagttgttgagattcttgagtttgatgctgtgcagcacgtcgttaataaagctgaggtagtacctatcgagcagcttcttcacgcccttgtagtcttcggcgcgcttctcgtcttccaccaggagcctcttgttgtcgatgttctcctgggtcttgcccaccgggatcgctttaaacctgagggttttggagaggctgtaacagtttgtaaacttctccagcttggacgccataccctgtataatccaaaacaaagaaaaacaaatgaatcaatcaccaatttttcattgtgtgtacaacaaggttaaaagaatatgggttatgaaaactggaagcagcagatcagcaattataatcaattcaatttacaacagacatcaaaaaaacttgctcatcaaattctccctgacaatcaataaatcgggtaaaaaatatccatgtactaatctaattaaaggacgtattttttgaatcatacaatacaaaaatccaaatctaaaaatttatatgaacccctaatcacaatctaaagactgtctttgaaaaacaaaggattaaatcatacaataaacagtaaaatcaagtaaacggttcaattcagaaggatttcaatcagatgaaagaaaagaacaaaaccctaattgaatttaaatttgacggatcaaaagaaaagatcgattaaacgatagtagctaataataataaaataatcgaagaatagaaagtagattataccttgaaacggaattgggtgctaggtttgaatgaatctcttttccaaaggaaccggttttgtagcgatggggaagaaaagaatgaagaagtttagtttacctgatttgcttttatagcaaaaatcgattggctgttatattacgccaacggcacctcttccaattaaaacgtgacacgtggacaaactgtgacttgttacctaaccctttgtgatacgacaacgtttggtataagagagtccacgtctattatatgctgtcttgcaccgcctcgagacaattcttctaactaagatcgattgtgatacaggtgcgggtacaatacaatacgggtacgtgaattagcggtttttaaaaaaaaattaagatacgatacggtaatgacttatgatacgttaacaatgatttataataaaacttatatttgaagaaaaattaacactgattactctttattattgtattattataaaagatacaatttttaaaaaatagtacatgtgattattaaaataaattttttaaaaattttcttataaatcatattacattttcatatgatgtgatattgagagaaacatcattaaaagaacttaacattaattttatttaatgttgtctaactgaatcacctctctcgctacgttcttccacaagaaatataattttaagtgtttcatcgagaatcaattatactgatgcatatctaaaattgaatcatatacatttataatgaatttttacaacattgtctcacttttttactcttcatgtttttctaggatacgtatctataaagtatcttagaaatatccttgtgtatatgtagagtatcacataagtatccgataaaatatttattaaaaattaaaataattaatatgatacttcgtgcgtacgtatccgatatgagtaagtctctgtattgaagtatacaggtttcatagctgatacatctctttcacggttttgtctaatgtacccaaatcataagtaaaatagtattgcgtcataaactagtgtgtgttttttattttcacgtgtccgtcttttcgtttttttagtgcgctgacgtttaaaaattattaacagtggcgcgcctagctaactagctagccacgtgactcgcagaacgttgtgtggcgagacggaaagaaagtcacgcctccaaagagtgcagcatctcttctggctctcacggtcctctgtggatccatcgatatcgaattcctgcaggctcgaggtcattcatatgcttgagaagagagtcgggatagtccaaaataaaacaaaggtaagattacctggtcaaaagtgaaaacatcagttaaaaggtggtataaagtaaaatatcggtaataaaaggtggcccaaagtgaaatttactcttttctactattataaaaattgaggatgtttttgtcggtactttgatacgtcatttttgtatgaattggtttttaagtttattcgcttttggaaatgcatatctgtatttgagtcgggttttaagttcgtttgcttttgtaaatacagagggatttgtataagaaatatctttagaaaaacccatatgctaatttgacataatttttgagaaaaatatatattcaggcgaattctcacaatgaacaataataagattaaaatagctttcccccgttgcagcgcatgggtattttttctagtaaaaataaaagataaacttagactcaaaacatttacaaaaacaacccctaaagttcctaaagcccaaagtgctatccacgatccatagcaagcccagcccaacccaacccaacccaacccaccccagtccagccaactggacaatagtctccacacccccccactatcaccgtgagttgtccgcacgcaccgcacgtctcgcagccaaaaaaaaaaagaaagaaaaaaaagaaaaagaaaaaacagcaggtgggtccgggtcgtgggggccggaaacgcgaggaggatcgcgagccagcgacgaggagcttaggcctcatcgttgaagatgcctctgccgacagtggtcccaaagatggacccccacccacgaggagcatcgtggaaaaagaagacgttccaaccacgtcttcaaagcaagtggattgatgtgatatctccactgacgtaagggatgacgcacaatcccactatccttcgaggcctcatcgttgaagatgcctctgccgacagtggtcccaaagatggacccccacccacgaggagcatcgtggaaaaagaagacgttccaaccacgtcttcaaagcaagtggattgatgtgatatctccactgacgtaagggatgacgcacaatcccactatccttcgaagctccctccctccgcttccaaagaaacgccccccatcgccactatatacatacccccccctctcctcccatccccccaacccttctagaaccatcttccacacactcaagccacactattggagaacacacagggacaacacaccataagatccaagggaggcctccgccgccgccggtaaccaccccgcccctctcctctttctttctccgtttttttttccgtctcggtctcgatctttggccttggtagtttgggtgggcgagaggcggcttcgtgcgcgcccagatcggtgcgcgggaggggcgggatctcgcggctggggctctcgccggcgtggatccggcccggatctcgcggggaatggggctctcggatgtagatctgcgatccgccgttgttgggggagatgatggggggtttaaaatttccgccgtgctaaacaagatcaggaagaggggaaaagggcactatggtttatatttttatatatttctgctgcttcgtcaggcttagatgtgctagatctttctttcttctttttgtgggtagaatttgaatccctcagcattgttcatcggtagtttttcttttcatgatttgtgacaaatgcagcctcgtgcggagcttttttgtaggtagaaggcggccgcatggcccagtctaagcacgggttgacgaaggagatgactatgaagtatcgcatggaaggctgcgttgacggccacaaattcgtcattaccggcgagggcatcggctacccctttaaggtaagtttctgcttctacctttgatatatatataataattatcattaattagtagtaatataatatttcaaatatttttttcaaaataaaagaatgtagtatatagcaattgcttttctgtagtttataagtgtgtatattttaatttataacttttctaatatatgaccaaaatttgttgatgtgcagggcaagcaagcgataaacctgtgcgtggtggagggtggccctctgcccttcgccgaggatatactctcagccgccttcatgtacgggaatcgggtgttcacggagtacccgcaagacatcgtggactacttcaagaactcctgccccgccggatacacatgggaccgttccttcctcttcgaggacggagccgtttgcatctgcaacgcggacatcaccgtgtccgtcgaggagaactgcatgtaccacgagtcaaagttctatggagtgaacttcccggccgatggtcccgtgatgaagaaaatgacggacaactgggagccgtcgtgcgagaaaatcattcccgtcccaaaacagggaatcctcaagggcgacgtgtcgatgtacctacttctcaaggacggtggacggctacggtgccagttcgacactgtttacaaggcgaagtcggtgccgaggaagatgccggactggcactttatccagcacaagctgacaagggaggacagaagcgacgctaagaaccagaaatggcacctcaccgagcacgccatcgccagtggctctgcgctgcccgggtgaccctgcaatgtgaccctagacttgtccatcttctggattggccaacttaattaatgtatgaaataaaaggatgcacacatagtgacatgctaatcactataatgtgggcatcaaagttgtgtgttatgtgtaattactaattatctgaataagagaaagagatcatccatatttcttatcctaaatgaatgtcacgtgtctttataattctttgatgaaccagatgcattttattaaccaattccatatacatataaatattaatcatatataattaatatcaattgggttagcaaaacaaatctagtctaggtgtgttttgctaattattgggggatagtgcaaaaagaaatctacgttctcaataattcagatagaaaacttaataaagtgagataatttacatagattgcttttatcctttgatatatgtgaaaccatgcatgatataaggaaaatagatagagaaataattttttacatcgttgaatatgtaaacaatttaattcaagaagctaggaatataaatattgaggagtttatgattattattattattttgatgttcaatgaagttttttttaatttcatatgaagtatacaaaaattcttcatagatttttgtttctatgccgtagttatctttaatatatttgtggttgaagaaatttattgctagaaacgaatggattgtcaatttttttttaaagcaaatatatatgaaattatactgtatattattttagtcatgattaaaatgtggccttaattgaatcatctttctcattcattttttcaaaagcatatcaggatgattgatatttatctattttaaaaattaatttaagggttcaaattaaatttaacttaaaagtgtcctaaccgtagttaaaggtttactttaaaaaaatactatgaaaaatctaatcttctatgaatcgagggcccggccgtgacggccacgagcgaactcctgcaggcgataaaaatgttttaaacgatatatattataaaaaaaaacgtttcaaaaataaatacaaaaatgtttttaaatatatataatttaactcattaaagaaaataaaaatgcaagtgcggtgacaagacaagctaaaagttgcaaaagaaatggcagggctataaggctcacctactcctggatttaccaaattttggttcgtccctatactcgaaaaataaaacaaaataaatttcagtatcttcgtttttgtatgctttgactgtgaggcgaggccaactttcttcttctgtctgagatgaattttgtttgcctcctgtgaaggatgtatcattcaaagtgaatgttttgcaactgccagtagtcccacatcgaccaaatattcttattacagtgtgtttatatagcacctggagaaggaatgggttgtttcaaagattaaataatttctactaagtgtagattgccgttaatttgagagtccaagtaatttctactaagtgtagatttttttttgcggccgcacaacaaacgcgccggcga

SEQ ID NO: 136 - DNA, 7267 bp, synthetic construct
  misc_feature 1..7267: note = pWISE3123 Full Plasmid Sequence
  source 1..7267: mol_type = other DNA
ccaccggaaggagctgactgggttgaaggctctcaagggcatcggtcgagatcccggtgcctaatgagtgagctaacttacattaattgcgttgcgccccgggatgagattatcaaaaaggatcttcacctagatccttttaaattaaaaatgaagttttaaatcaatctaaagtatatatgtgtaacattggtctagtgattggatccttgacagctagctcagtcctaggtactgtgctagcgctagcaaagaggagaaaggtaccatgcccgatcgagctcaagttatcattcgcattgtgccgggaggtggcaccaagacccttcaacaaattatcaatcagttggagtatctatcccggaagggcaggctggagctgcagcgttcagcccgacatctcgatattcccctgccaccggatcaaatccacgaacttgcccgaagctgggttcaagagactggaacttatgacgaaagtcagccagacgaggaaaggcaacaggagttgaccacccatattattgtaagcttccccgccggtacaagccaggtagcggcttatgcggcgagccgggagtgggcagccgagatgtttgggtcaggcgcaggggggggccgatacaactatcttacggccttccacatcgatcgcgaccacccacatctgcatgtcgtcgtcaatcggcgcgaacttttaggacacggctggctgaagatatctcggcgccatccccaactgaattacgacgccctgcgcataaagatggccgagatttcacttcgtcatggcattgccctcgatgcgagccgacgagcagaacgtggcatcaccgagcggccgatcacttatgcccaatatcggcgccttgagcgggagcaggctcgccaaatccgtttcgaagacgcggatttggaacagtcgtcgccgcaaggagatcatccagaattcagccaacctttcgatacatccccatttgaagcatccgcgggcggaccggaggacatgcctcggcccaacaatcggcagaatgagtcgcaagttcatctccaggagccagctggtgtcagcaacgaagccggtgtccttgtgcgggttgcattggaaacggagcgccttgctcaaccattcgtttccgaaaccattctcgcggacgacatagggagcggctcttcgcgtgttgccgagggccgtgtggagagcgcaaaccgcactcccgatattcctcgcgcagcaactgaagctgccacgcacacgacacacgaccggcagcggcgtgcaaagcgtcctcatgatgacgacggagggccgagtggagcaaaacgtgtgacattggaaggcatcgcggttgggccccaggcgaacgccggcgaacaggatggcagtagtgggggctcctcgggtggcagcatgagcggatcaaaaaaaagaaggatcaagcaagatccgccgccagcgctgccgcccaagcgccgtcgctccggcggtagcagcggtggttccccgccgccggctctgccgccgaagcgccgtagaagcggcggttcaagcggtggctctccgccaccggcactgcctccgaaacgtcgtcgttctggcggtagcagcggtggctcgccgccgccggcgttgccgccgaaacgccgtcgttccggtagtggggggtcctctggtggaagtagtggccccttagtacggcaagctggaacgtcacggccatctccaccgacggccacgacgcgggccagcaccgcaaccgattcattgtctgctacagcccacctccagcaacggagaggtgtcctttcaaagcgtccgcgtgaagatgatgatggagaaccgagtgaacgcaaacgcgagagagatgagcgcagcaaggacgggcgtgggggaaataggagatagtctagaccaggcatcaaataaaacgaaaggctcagtcgaaagactgggcctttcgttttatctgttgtttgtcggtgaacgctctctactagagtcacactggctcaccttcgggtgggcctttctgcgtttatagtacgatatcccaatggcgcgccgagcttggctcgagcatggtcatagctgtttcctgtgtgaaattgttatccgctcacaattccacacaacatacgagccggaagcataaagtgtaaagcctggggtgcctaatgagtgagctaactcacattaattgcgttgcgctcactgcccgctttccagtcgggaaacctgtcgtgccagctgcattaatgaatcggccaacgcgcggggagaggcggtttgcgtattgggcgctgttccgcttcctcgctcactgactcgctgcgctcggtcgttcggctgcggcgagcggtatcagctcactcaaaggcggtaatacggttatccacagaatcaggggataacgcaggaaagaacatgtgagcaaaaggccagcaaaaggccaggaaccgtaaaaaggccgcgttgctggcgtttttccataggctccgcccccctgacgagcatcacaaaaatcgacgctcaagtcagaggtggcgaaacccgacaggactataaagataccaggcgtttccccctggaagctccctcgtgcgctctcctgttccgaccctgccgcttaccggatacctgtccgcctttctcccttcgggaagcgtggcgctttctcatagctcacgctgtaggtatctcagttcggtgtaggtcgttcgctccaagctgggctgtgtgcacgaaccccccgttcagcccgaccgctgcgccttatccggtaactatcgtcttgagtccaacccggtaagacacgacttatcgccactggcagcagccactggtaacaggattagcagagcgaggtatgtaggcggtgctacagagttcttgaagtggtggcctaactacggctacactagaagaacagtatttggtatctgcgctctgctgaagccagttaccttcggaaaaagagttggtagctcttgatccggcaaacaaaccaccgctggtagcggtggtttttttgtttgcaagcagcagattacgcgcagaaaaaaaggatctcaagaagatcctttgatcttttctacggggtctgacgctcagtggaacgaaaactcacgttaagggattttggtcatgagattatcaaaaaggatcttcacctagatccttttaaattaaaaatgaagttttaaatcaatctaaagtatatatgagtaaacttggtctgacagttagaaaaactcatcgagcatcaaatgaaactgcaatttattcatatcaggattatcaataccatatttttgaaaaagccgtttctgtaatgaaggagaaaactcaccgaggcagttccataggatggcaagatcctggtatcggtctgcgattccgactcgtccaacatcaatacaacctattaatttcccctcgtcaaaaataaggttatcaagtgagaaatcaccatgagtgacgactgaatccggtgagaatggcaaaagtttatgcatttctttccagacttgttcaacaggccagccattacgctcgtcatcaaaatcactcgcatcaaccaaaccgttattcattcgtgattgcgcctgagcgaaacgaaatacgcgatcgctgttaaaaggacaattacaaacaggaatcgaatgcaaccggcgcaggaacactgccagcgcatcaacaatattttcacctgaatcaggatattcttctaatacctggaatgctgttttcccagggatcgcagtggtgagtaaccatgcatcatcaggagtacggataaaatgcttgatggtcggaagaggcataaattccgtcagccagtttagtctgaccatctcatctgtaacatcattggcaacgctacctttgccatgtttcagaaacaactctggcgcatcgggcttcccatacaatcgatagattgtcgcacctgattgcccgacattatcgcgagcccatttatacccatataaatcagcatccatgttggaatttaatcgcggcctagagcaagacgtttcccgttgaatatggctcatactcttcctttttcaatattattgaagcatttatcagggttattgtctcatgagcggatacatatttgaatgtatttagaaaaataaacaaataggggttccgcgcacatttccccgaaaagtgccacctgacgtctaagaaaccattattatcatgacattaacctataaaaataggcgtatcacgaggcccttttgtctcgcgcgtttcggtgatgacggtgaaaacctctgacacatgcagctcccggagactgtcacagcttgtctgtaagcggatgccgggagcagacaagcccgtcagggcgcgtcagcgggtgttggcgggtgtcggggctggcttaactatgcggcatcagagcagattgtactgagagtgcaccatatgcggtgtgaaataccgcacagatgcgtaaggagaaaataccgcatcaggcgccattcgccattcaggctgcgcaactgttgggaagggcgatcggtgcgggcctcttcgctattacgccagctggcgaaagggggatgtgctgcaaggcgattaagttgggtaacgccagggttttcccagtcacgacgttgtaaaacgacggccagtgaattgacgcgttgcggctgcatgaaatcctggccggtttgtctgatgccaagctggcggcctggccggccagcttggccgctgaagaaaccgagcgccgccgtctaaaaaggtgatgtgtatttgagtaaaacagcttgcgtcatgcggtcgctgcgtatatgatgcgatgagtaaataaacaaatacgcaaggggaacgcatgaaggttatcgctgtacttaaccagaaaggcgggtcaggcaagacgaccatcgcaacccatctagcccgcgccctgcaactcgccggggccgatgttctgttagtcgattccgatccccagggcagtgcccgcgattgggcggccgtgcgggaagatcaaccgctaaccgttgtcggcatcgaccgcccgacgattgaccgcgacgtgaaggccatcggccggcgcgacttcgtagtgatcgacggagcgccccaggcggcggacttggctgtgtccgcgatcaaggcagccgacttcgtgctgattccggtgcagccaagcccttacgacatatgggccaccgccgacctggtggagctggttaagcagcgcattgaggtcacggatggaaggctacaagcggcctttgtcgtgtcgcgggcgatcaaaggcacgcgcatcggcggtgaggttgccgaggcgctggccgggtacgagctgcccattcttgagtcccgtatcacgcagcgcgtgagctacccaggcactgccgccgccggcacaaccgttcttgaatcagaacccgagggcgacgctgcccgcgaggtccaggcgctggccgctgaaattaaatcaaaactcatttgagttaatgaggtaaagagaaaatgagcaaaagcacaaacacgctaagtgccggccgtccgagcgcacgcagcagcaaggctgcaacgttggccagcctggcagacacgccagccatgaagcgggtcaactttcagttgccggcggaggatcacaccaagctgaagatgtacgcggtacgccaaggcaagaccattaccgagctgctatctgaatacatcgcgcagctaccagagtaaatgagcaaatgaataaatgagtagatgaattttagcggctaaaggaggcggcatggaaaatcaagaacaaccaggcaccgacgccgtggaatgccccatgtgtggaggaacgggcggttggccaggcgtaagcggctgggttgtctgccggccctgcaatggcactggaacccccaagcccgaggaatcggcgtgagcggtcgcaaaccatccggcccggtacaaatcggcgcggcgctgggtgatgacctggtggagaagttgaaggccgcgcaggccgcccagcggcaacgcatcgaggcagaagcacgccccggtgaatcgtggcaagcggccgctgatcgaatccgcaaagaatcccggcaaccgccggcagccggtgcgccgtcgattaggaagccgcccaagggcgacgagcaaccagattttttcgttccgatgctctatgacgtgggcacccgcgatagtcgcagcatcatggacgtggccgttttccgtctgtcgaagcgtgaccgacgagctggcgaggtgatccgctacgagcttccagacgggcacgtagaggtttccgcagggccggccggcatggccagtgtgtgggattacgacctggtactgatggcggtttcccatctaaccgaatccatgaaccgataccgggaagggaagggagacaagcccggccgcgtgttccgtccacacgttgcggacgtactcaagttctgccggcgagccgatggcggaaagcagaaagacgacctggtagaaacctgcattcggttaaacaccacgcacgttgccatgcagcgtacgaagaaggccaagaacggccgcctggtgacggtatccgagggtgaagccttgattagccgctacaagatcgtaaagagcgaaaccgggcggccggagtacatcgagatcgagctagctgattggatgtaccgcgagatcacagaaggcaagaacccggacgtgctgacggttcaccccgattactttttgatcgatcccggcatcggccgttttctctaccgcctggcacgccgcgccgcaggcaaggcagaagccagatggttgttcaagacgatctacgaacgcagtggcagcgccggagagttcaagaagttctgtttcaccgtgcgcaagctgatcgggtcaaatgacctgccggagtacgatttgaaggaggaggcggggcaggctggcccgatcctagtcatgcgctaccgcaacctgatcgagggcgaagcatccgccggttcctaatgtacggagcagatgctagggcaaattgccctagcaggggaaaaaggtcgaaaaggtctctttcctgtggatagcacgtacattgggaacccaaagccgtacattgggaaccggaacccgtacattgggaacccaaagccgtacattgggaaccggtcacacatgtaagtgactgatataaaagagaaaaaaggcgatttttccgcctaaaactctttaaaacttattaaaactcttaaaacccgcctggcctgtgcatatgctagtcatgccccgcgc

SEQ ID NO: 137 - DNA, 18472 bp, synthetic construct
  misc_feature 1..18472: note = pWISE3090 Full Plasmid Sequence
  source 1..18472: mol_type = other DNA
agcttactagtcaacaattggccaatctttgttctaaattgctaataaacgaccatttccgtcaattctccttggttgcaacagtctacccgtcaaatgtttactaatttataagtgtgaagtttgaattatgaaagacgaaatcgtattaaaaattcacaagaataaacaactccatagattttcaaaaaaacagtcacgagaaaaaaaccacagtccgtttgtctgctcttctagtttttattatttttctattaatagttttttgttatttcgagaataaaatttgaacgatgtccgaaccacaaaagccgagccgataaatcctaagccgagcctaactttagccgtaaccatcagtcacggctcccgggctaattcatttgaaccgaatcataatcaacggtttagatcaaactcaaaacaatctaacggcaacatagacgcgtcggtgagctaaaaagagtgtgaaagccaggtcaccatagcattgtctctcccagattttttatttgggaaataatagaagaaatagaaaaaaataaaagagtgagaaaaatcgtagagctatatattcgcacatgtactcgtttcgctttccttagtgttagctgctgccgctgttgtttctcctccatttctctatctttctctctcgctgcttctcgaatcttctgtatcatcttcttcttcttcaaggtgagtctctagatccgttcgcttgattttgctgctcgttagtcgttattgttgattctctatgccgatttcgctagatctgtttagcatgcgttgtggttttatgagaaaatctttgttttgggggttgcttgttatgtgattcgatccgtgcttgttggatcgatctgagctaattcttaaggtttatgtgttagatctatggagtttgaggattcttctcgcttctgtcgatctctcgctgttatttttgtttttttcagtgaagtgaagttgtttagttcgaaatgacttcgtgtatgctcgattgatctggttttaatcttcgatctgttaggtgttgatgtttacaagtgaattctagtgttttctcgttgagatctgtgaagtttgaacctagttttctcaataatcaacatatgaagcgatgtttgagtttcaataaacgctgctaatcttcgaaactaagttgtgatctgattcgtgtttacttcatgagcttatccaattcatttcggtttcattttactttttttttagtgaaccatggcgcaagttagcagaatctgcaatggtgtgcagaacccatctcttatctccaatctctcgaaatccagtcaacgcaaatctcccttatcggtttctctgaagacgcagcagcatccacgagcttatccgatttcgtcgtcgtggggattgaagaagagtgggatgacgttaattggctctgagcttcgtcctcttaaggtcatgtcttctgtttccacggcgtgcatgggggaagcggtgatcgccgaagtatcgactcaactatcagaggtagttggcgtcatcgagcgccatctcgaaccgacgttgctggccgtacatttgtacggctccgcagtggatggcggcctgaagccacacagtgatattgatttgctggttacggtgaccgtaaggcttgatgaaacaacgcggcgagctttgatcaacgaccttttggaaacttcggcttcccctggagagagcgagattctccgcgctgtagaagtcaccattgttgtgcacgacgacatcattccgtggcgttatccagctaagcgcgaactgcaatttggagaatggcagcgcaatgacattcttgcaggtatcttcgagccagccacgatcgacattgatctggctatcttgctgacaaaagcaagagaacatagcgttgccttggtaggtccagcggcggaggaactctttgatccggttcctgaacaggatctatttgaggcgctaaatgaaaccttaacgctatggaactcgccgcccgactgggctggcgatgagcgaaatgtagtgcttacgttgtcccgcatttggtacagcgcagtaaccggcaaaatcgcgccgaaggatgtcgctgccgactgggcaatggagcgcctgccggcccagtatcagcccgtcatacttgaagctagacaggcttatcttggacaagaagaagatcgcttggcctcgcgcgcagatcagttggaagaatttgtccactacgtgaaaggcgagatcaccaaggtagtcggcaaataaggatcaattcccgatcgttcaaacatttggcaataaagtttcttaagattgaatcctgttgccggtcttgcgatgattatcatataatttctgttgaattacgttaagcatgtaataattaacatgtaatgcatgacgttatttatgagatgggtttttatgattagagtcccgcaattatacatttaatacgcgatagaaaacaaaatatagcgcgcaaactaggataaattatcgcgcgcggtgtcatctatgttactagatcggtacctacgcgtagctagcccgtgaagtttctcatctaagcccccatttggacgtgaatgtagacacgtcgaaataaagatttccgaattagaataatttgtttattgctttcgcctataaatacgacggatcgtaatttgtcgttttatcaaaatgtactttcattttataataacgctgcggacatctacatttttgaattgaaaaaaaattggtaattactctttctttttctccatattgaccatcatactcattgctgatccatgtagatttcccggacatgaagccatttacaattgaatatatcctgccgccgctgccgctttgcacccggtggagcttgcatgttggtttctacgcagaactgagccggttaggcagataatttccattgagaactgagccatgtgcaccttccccccaacacggtgagcgacggggcaacggagtgatccacatgggacttttcctagcttggctgccatttttggggtgaggccgttcgcggccgaggggcgcagcccctggggggatgggaggcccgcgttagcgggccgggagggttcgagaagggggggcaccccccttcggcgtgcgcggtcacgcgcacagggcgcagccctggttaaaaacaaggtttataaatattggtttaaaagcaggttaaaagacaggttagcggtggccgaaaaacgggcggaaacccttgcaaatgctggattttctgcctgtggacagcccctcaaatgtcaataggtgcgcccctcatctgtcagcactctgcccctcaagtgtcaaggatcgcgcccctcatctgtcagtagtcgcgcccctcaagtgtcaataccgcagggcacttatccccaggcttgtccacatcatctgtgggaaactcgcgtaaaatcaggcgttttcgccgatttgcgaggctggccagctccacgtcgccggccgaaatcgagcctgcccctcatctgtcaacgccgcgccgggtgagtcggcccctcaagtgtcaacgtccgcccctcatctgtcagtgagggccaagttttccgcgaggtatccacaacgccggcggccggccgcggtgtctcgcacacggcttcgacggcgtttctggcgcgtttgcagggccatagacggccgccagcccagcggcgagggcaaccagcccggtgagcgtcggaaagggtcgatcgaccgatgcccttgagagccttcaacccagtcagctccttccggtgggcgcggggcatgactatcgtcgccgcacttatgactgtcttctttatcatgcaactcgtaggacaggtgccggcagcgctctgggtcattttcggcgaggaccgctttcgctggagcgcgacgatgatcggcctgtcgcttgcggtattcggaatcttgcacgccctcgctcaagccttcgtcactggtcccgccaccaaacgtttcggcgagaagcaggccattatcgccggcatggcggccgacgcgctgggctacgtcttgctggcgttcgcgacgcgaggctggatggccttccccattatgattcttctcgcttccggcggcatcgggatgcccgcgttgcaggccatgctgtccaggcaggtagatgacgaccatcagggacagcttcaaggatcgctcgcggctcttaccagcctaacttcgatcattggaccgctgatcgtcacggcgatttatgccgcctcggcgagcacatggaacgggttggcatggattgtaggcgccgccctataccttgtctgcctccccgcgttgcgtcgcggtgcatggagccgggccacctcgacctgaatggaagccggcggcacctcgctaacggattcaccactccaagaattggagccaatcaattcttgcggagaactgtgaatgcgcaaaccaacccttggcagaacatatccatcgcgtccgccatctccagcagccgcacgcggcgcatctcgggcagcgttgggtcctggccacgggtgcgcatgatcgtgctcctgtcgttgaggacccggctaggctggcggggttgccttactggttagcagaatgaatcaccgatacgcgagcgaacgtgaagcgactgctgctgcaaaacgtctgcgacctgagcaacaacatgaatggtcttcggtttccgtgtttcgtaaagtctggaaacgcggaagtcagcgccctgcaccattatgttccggatctgcatcgcaggatgctgctggctaccctgtggaacacctacatctgtattaacgaagcgctggcattgaccctgagtgatttttctctggtcccgccgcatccataccgccagttgtttaccctcacaacgttccagtaaccgggcatgttcatcatcagtaacccgtatcgtgagcatcctctctcgtttcatcggtatcattacccccatgaacagaaatcccccttacacggaggcatcagtgaccaaacaggaaaaaaccgcccttaacatggcccgctttatcagaagccagacattaacgcttctggagaaactcaacgagctggacgcggatgaacaggcagacatctgtgaatcgcttcacgaccacgctgatgagctttaccgcagctgcctcgcgcgtttcggtgatgacggtgaaaacctctgacacatgcagctcccggagacggtcacagcttgtctgtaagcggatgccgggagcagacaagcccgtcagggcgcgtcagcgggtgttggcgggtgtcggggcgcagccatgacccagtcacgtagcgatagcggagtgtatactggcttaactatgcggcatcagagcagattgtactgagagtgcaccatatgcggtgtgaaataccgcacagatgcgtaaggagaaaataccgcatcaggcgctcttccgcttcctcgctcactgactcgctgcgctcggtcgttcggctgcggcgagcggtatcagctcactcaaaggcggtaatacggttatccacagaatcaggggataacgcaggaaagaacatgtgagcaaaaggccagcaaaaggccaggaaccgtaaaaaggccgcgttgctggcgtttttccataggctccgcccccctgacgagcatcacaaaaatcgacgctcaagtcagaggtggcgaaacccgacaggactataaagataccaggcgtttccccctggaagctccctcgtgcgctctcctgttccgaccctgccgcttaccggatacctgtccgcctttctcccttcgggaagcgtggcgctttctcatagctcacgctgtaggtatctcagttcggtgtaggtcgttcgctccaagctgggctgtgtgcacgaaccccccgttcagcccgaccgctgcgccttatccggtaactatcgtcttgagtccaacccggtaagacacgacttatcgccactggcagcagccactggtaacaggattagcagagcgaggtatgtaggcggtgctacagagttcttgaagtggtggcctaactacggctacactagaaggacagtatttggtatctgcgctctgctgaagccagttaccttcggaaaaagagttggtagctcttgatccggcaaacaaaccaccgctggtagcggtggtttttttgtttgcaagcagcagattacgcgcagaaaaaaaggatctcaagaagatcctttgatcttttctacggggtctgacgctcagtggaacgaaaactcacgttaagggattttggtcatgagattatcaaaaaggatcttcacctagatccttttaaattaaaaatgaagttttaaatcaatctaaagtatatatgagtaaacttggtctgacagttaccaatgcttaatcagtgaggcacctatctcagcgatctgtctatttcgttcatccatagttgcctgactccccgtcgtgtagataactacgatacgggagggcttaccatctggccccagtgctgcaatgataccgcgagacccacgctcaccggctccagatttatcagcaataaaccagccagccggaagggccgagcgcagaagtggtcctgcaactttatccgcctccatccagtctattaattgttgccgggaagctagagtaagtagttcgccagttaatagtttgcgcaacgttgttgccattgctgcaggtcgggagcacaggatgacgcctaacaattcattcaagccgacaccgcttcgcggcgcggcttaattcaggagttaaacatcatgagggaagcggtgatcgccgaagtatcgactcaactatcagaggtagttggcgtcatcgagcgccatctcgaaccgacgttgctggccgtacatttgtacggctccgcagtggatggcggcctgaagccacacagtgatattgatttgctggttacggtgaccgtaaggcttgatgaaacaacgcggcgagctttgatcaacgaccttttggaaacttcggcttcccctggagagagcgagattctccgcgctgtagaagtcaccattgttgtgcacgacgacatcattccgtggcgttatccagctaagcgcgaactgcaatttggagaatggcagcgcaatgacattcttgcaggtatcttcgagccagccacgatcgacattgatctggctatcttgctgacaaaagcaagagaacatagcgttgccttggtaggtccagcggcggaggaactctttgatccggttcctgaacaggatctatttgaggcgctaaatgaaaccttaacgctatggaactcgccgcccgactgggctggcgatgagcgaaatgtagtgcttacgttgtcccgcatttggtacagcgcagtaaccggcaaaatcgcgccgaaggatgtcgctgccgactgggcaatggagcgcctgccggcccagtatcagcccgtcatacttgaagctaggcaggcttatcttggacaagaagatcgcttggcctcgcgcgcagatcagttggaagaatttgttcactacgtgaaaggcgagatcaccaaggtagtcggcaaataatgtctaacaattcgttcaagccgacgccgcttcgcggcgcggcttaactcaagcgttagatgctgcaggcatcgtggtgtcacgctcgtcgtttggtatggcttcattcagctccggttcccaacgatcaaggcgagttacatgatcccccatgttgtgcaaaaaagcggttagctccttcggtcctccgatcgaggatttttcggcgctgcgctacgtccgcgaccgcgttgagggatcaagccacagcagcccactcgaccttctagccgacccagacgagccaagggatctttttggaatgctgctccgtcgtcaggctttccgacgtttgggtggttgaacagaagtcattatcgcacggaatgccaagcactcccgaggggaaccctgtggttggcatgcacatacaaatggacgaacggataaaccttttcacgcccttttaaatatccgattattctaataaacgctcttttctcttaggtttacccgccaatatatcctgtcaaacactgatagtttaaactgaaggcgggaaacgacaatctggcgcgccattgggatcctgcagggagccactgaaattctgtaagaactacattcgccgtgagtttgacataatcacaacgagccactgaaattttgtaaaaactacacttaagagcttcaacaaaatcagtgtcacggtaatttttgtcaaaattcactaattcaaaagctaatgccaaaaattggcaatgactcaactcaagaatctcatcttccacagggtaagctgttaccataaggtgagaacataatagaatttgataattgaaattttgcattgcaaggcattattaccaagagaagtctatgccaaagccacaacactaaacagatgtattaagcccaaagggagacacaaagaagctacaaacaagtacttattgcttttacatcatcacgataagctttggttcagtactaacatcagcaattaaaaggccacacaataagagatgttctcatggtcataattgtaattacagagctcaataatgaaagtatgaaatcatgacagagagccctttcagtgcttcacggaggtctgcgcgtactccagccactccttgttggaaatggcaattttcaccttgtcgagcttctcatcctccgcctttttgaactgcccgatggcccagagcactttcctggcgatattataggccccgttcgcatcggcgttcttcgggaggatcgcattctcttgcgcctcatagttgcgggagtcgtaaaagatcccgtcggagttcttcaccgggctgatgaggaagtcgacgtcggtgcgccctgtgatgctattcctcatttggagcatcagggacatgagggccatgaagctggagtaaaacgctttgtcggactgctcacagaggagggcgcgaatgtcgccctgctggtaattgatgccgtatttattgaacagttccttgtaggcggatgtcaggcacacttcctcccagtcaaagacgttatttttttttggattcctgaagatgcggatcctgttcccgtaggagtacagcttccacttcttgatgtaatccgcatctgtgcggctgaagtttttgtagtcgagggcgaactcgaagaggtcctcctccggcacatacataatgcggtcgaaggaggagataaacttcttgctgtcggcaatggaggtatactttgtcttcaggaggttcacgaagccggtgctcgggtcaatcttggaggtgagccacgccgggatgtagaaaataaacccgttctgggtgctcatgctcttgaagctctcgaacttgttggtgatctgatagcccttcagcgcgccccctgtggcacacgggttggacttcttatccaccatataattgagtttgtcgatcagcattttctcgaatttctgatacacctgtttttccaccttcacgcgggagttcttgaacccagaatttaagtcttcgagcgcaatcacggcgtcatatttctccaccagctcgcagatcttgtggacgacttgggaaatatagccggcctttaattctttgatattctcaatggaggtccagttttggcgggcctcaaacctctctttttctttcttgtcgagcaggctgtgatagtcggtcttaatcctaatcccattgaagttgttgataatctcgttcagggagtactgctccacaatattgcccttcccatccacgaccacgatatagagcagattgcgctcgcccctgtcaatgccgatgacatacggattgtcgtcgtgtttgagcagcaccctgacctctgtattaattttgaagatattctttgggcacttattaatcgcaattgggatgtgtaattcgtactggtcttcgctgaagcgtttgtccttgtagacgtcgtaggacagggtggtggtctttttcggattgtccgggttcttgttcgcgatcggggaattggctggatggacgaccagctcttccttcttgagggaggccctgcgcatgaataattcggcgccgccgctcagcctgatttgcccgtggttgttctcgtcaaagagcagtttgaagtacatggtgtggaggtttggggtcccatggctcttgtcggaaaagtccttgttataaatttggaacatgtagagcttgccctcctcgacgagcttgtcgacttccttcttgctcgcggattcaaaagaaactttatacccttgctcctccacctccctgtaaaagcccgcgatgtctttgtacttttctgtctcggagaagttaaaatcgtacgcattggaccatttcgggtagcgggaaatgctatccttgaagaaatcaatgagcttgtggcagtcgttgaggttaaacatgtcccccttcttgaaggtcccgtttttatagattttctgaatatcctcgcttggattgtagtaggccatccacttcttgctgaagaacaccttcgggagcatcttgttcggacccggcagcagcttgtagttgatcttttcatagttgccattgacgtcgtctttgtcgatcttctgcaggcacttcgcgtacttcttgtccatgatggccagatagtatttggagccatagcggagaattgtcgcgcggtagtctgtctctttatccttgtcccagccccccataaattgcgggttctggaagtacagcttgaacttgtctttggagtacggcttctgtgtcacgtagttgcggatcgcgtcgtaaatgtggtcgaccttcagcaggatgtcgtacgcgaggacaaagtcgccatagaaggactcatccctgttagtttccttcccctccccaaagaacgctttaatgtaattttcgaaggacttcacggagtcgagcaggtctttcataatggccaccacggcgtcattctttttgagggacttctcgagcacaaagtcggcgtcgaacagcttctcgctggacccgtacactttatagatctcgtcgaccttctgaatgatgatttccttcagcttctcgacgacggacagatccgcatcggcatactcctggagctgttcgaggctgaaggagccgatttttttgaaggacttcctgcgatcgtcctcatacttctcggtcaccaccgccttcttcttcaggtggatgtcgtcgtactcggcgttccacttgtccctgatgacgttccactcgccaaagatgtccttggagatggtgctgatcgccggcccgttcttcacgaaaatcccggcggagctgtactcgtcaaagttcttaaagagcttctcgagcttcttgatggaggagaaaatctcgctattcttattcagtgtgttgcggaagacttccagcacctcctcgtcgctggtatagccctcgccgtagaaggagaggctttccctatcggacaggacttgcttgtagagcggcttgaatttcggcagtttctgcttggtcttctgattgtacagattgatgtactcattcagccccttaatcttctccccggactctgtgacgaagcccccgataatcgcgttgtacacgtcaatgccctcttgtgtgagcacaaaattaaagaactccccttcgaagaaatcctcgacgtcataatcggaattgagaatcttctctttgatctcctgcacctcgtgcttatcgaagatcgcatccaccttctcgaaaatgtccatattggaaatgtagcgggtgaggttctcgttgatacacctgaaggcgatgctggtggacttggcctcctcggagaacatattttccctgttatcaaagaagccggtaaacgcggttgtgaacccgttaaaggagttcaccagcgcgatctcgtccttgtcatcgagaaactctgggaggatagtttcgatgatgtctttcttgaagaggctcttgtacccttcattgcccttgaacgctttggcgatttccttgcggaggttgatctccaggttctccagctccttgttctccttctcggtgcgggtctttttgcggaagagggagatgtagttgttgagattcttgagtttgatgctgtgcagcacgtcgttaataaagctgaggtagtacctatcgagcagcttcttcacgcccttgtagtcttcggcgcgcttctcgtcttccaccaggagcctcttgttgtcgatgttctcctgggtcttgcccaccgggatcgctttaaacctgagggttttggagaggctgtaacagtttgtaaacttctccagcttggagctgccggagccgccggagccgccctcgggcgtcgcgctctcggaggtgcctggtgtctcggaggagccgtacttctccacataagggacaggaatcattcctctcttcccttcagaatcttcagcattccaccattgttcttctggtttgtcccttattcggaggatgtcacctttcttgaagggcaaatcctcttcatcattgccgttaaaatcaaaaagggcacgaacatactctgccgccataccctgtataatccaaaacaaagaaaaacaaatgaatcaatcaccaatttttcattgtgtgtacaacaaggttaaaagaatatgggttatgaaaactggaagcagcagatcagcaattataatcaattcaatttacaacagacatcaaaaaaacttgctcatcaaattctccctgacaatcaataaatcgggtaaaaaatatccatgtactaatctaattaaaggacgtattttttgaatcatacaatacaaaaatccaaatctaaaaatttatatgaacccctaatcacaatctaaagactgtctttgaaaaacaaaggattaaatcatacaataaacagtaaaatcaagtaaacggttcaattcagaaggatttcaatcagatgaaagaaaagaacaaaaccctaattgaatttaaatttgacggatcaaaagaaaagatcgattaaacgatagtagctaataataataaaataatcgaagaatagaaagtagattataccttgaaacggaattgggtgctaggtttgaatgaatctcttttccaaaggaaccggttttgtagcgatggggaagaaaagaatgaagaagtttagtttacctgatttgcttttatagcaaaaatcgattggctgttatattacgccaacggcacctcttccaattaaaacgtgacacgtggacaaactgtgacttgttacctaaccctttgtgatacgacaacgtttggtataagagagtccacgtctattatatgctgtcttgcaccgcctcgagacaattcttctaactaagatcgattgtgatacaggtgcgggtacaatacaatacgggtacgtgaattagcggtttttaaaaaaaaattaagatacgatacggtaatgacttatgatacgttaacaatgatttataataaaacttatatttgaagaaaaattaacactgattactctttattattgtattattataaaagatacaatttttaaaaaatagtacatgtgattattaaaataaattttttaaaaattttcttataaatcatattacattttcatatgatgtgatattgagagaaacatcattaaaagaacttaacattaattttatttaatgttgtctaactgaatcacctctctcgctacgttcttccacaagaaatataattttaagtgtttcatcgagaatcaattatactgatgcatatctaaaattgaatcatatacatttataatgaatttttacaacattgtctcacttttttactcttcatgtttttctaggatacgtatctataaagtatcttagaaatatccttgtgtatatgtagagtatcacataagtatccgataaaatatttattaaaaattaaaataattaatatgatacttcgtgcgtacgtatccgatatgagtaagtctctgtattgaagtatacaggtttcatagctgatacatctctttcacggttttgtctaatgtacccaaatcataagtaaaatagtattgcgtcataaactagtgtgtgttttttattttcacgtgtccgtcttttcgtttttttagtgcgctgacgtttaaaaattattaacagtggcgcgcctagctaactagctagccacgtgactcgcagaacgttgtgtggcgagacggaaagaaagtcacgcctccaaagagtgcagcatctcttctggctctcacggtcctctgtggatccatcgatatcgaattcctgcaggctcgaggtcattcatatgcttgagaagagagtcgggatagtccaaaataaaacaaaggtaagattacctggtcaaaagtgaaaacatcagttaaaaggtggtataaagtaaaatatcggtaataaaaggtggcccaaagtgaaatttactcttttctactattataaaaattgaggatgtttttgtcggtactttgatacgtcatttttgtatgaattggtttttaagtttattcgcttttggaaatgcatatctgtatttgagtcgggttttaagttcgtttgcttttgtaaatacagagggatttgtataagaaatatctttagaaaaacccatatgctaatttgacataatttttgagaaaaatatatattcaggcgaattctcacaatgaacaataataagattaaaatagctttcccccgttgcagcgcatgggtattttttctagtaaaaataaaagataaacttagactcaaaacatttacaaaaacaacccctaaagttcctaaagcccaaagtgctatccacgatccatagcaagcccagcccaacccaacccaacccaacccaccccagtccagccaactggacaatagtctccacacccccccactatcaccgtgagttgtccgcacgcaccgcacgtctcgcagccaaaaaaaaaaagaaagaaaaaaaagaaaaagaaaaaacagcaggtgggtccgggtcgtgggggccggaaacgcgaggaggatcgcgagccagcgacgaggagcttaggcctcatcgttgaagatgcctctgccgacagtggtcccaaagatggacccccacccacgaggagcatcgtggaaaaagaagacgttccaaccacgtcttcaaagcaagtggattgatgtgatatctccactgacgtaagggatgacgcacaatcccactatccttcgaggcctcatcgttgaagatgcctctgccgacagtggtcccaaagatggacccccacccacgaggagcatcgtggaaaaagaagacgttccaaccacgtcttcaaagcaagtggattgatgtgatatctccactgacgtaagggatgacgcacaatcccactatccttcgaagctccctccctccgcttccaaagaaacgccccccatcgccactatatacatacccccccctctcctcccatccccccaacccttctagaaccatcttccacacactcaagccacactattggagaacacacagggacaacacaccataagatccaagggaggcctccgccgccgccggtaaccaccccgcccctctcctctttctttctccgtttttttttccgtctcggtctcgatctttggccttggtagtttgggtgggcgagaggcggcttcgtgcgcgcccagatcggtgcgcgggaggggcgggatctcgcggctggggctctcgccggcgtggatccggcccggatctcgcggggaatggggctctcggatgtagatctgcgatccgccgttgttgggggagatgatggggggtttaaaatttccgccgtgctaaacaagatcaggaagaggggaaaagggcactatggtttatatttttatatatttctgctgcttcgtcaggcttagatgtgctagatctttctttcttctttttgtgggtagaatttgaatccctcagcattgttcatcggtagtttttcttttcatgatttgtgacaaatgcagcctcgtgcggagcttttttgtaggtagaaggcggccgcatggcccagtctaagcacgggttgacgaaggagatgactatgaagtatcgcatggaaggctgcgttgacggccacaaattcgtcattaccggcgagggcatcggctacccctttaaggtaagtttctgcttctacctttgatatatatataataattatcattaattagtagtaatataatatttcaaatatttttttcaaaataaaagaatgtagtatatagcaattgcttttctgtagtttataagtgtgtatattttaatttataacttttctaatatatgaccaaaatttgttgatgtgcagggcaagcaagcgataaacctgtgcgtggtggagggtggccctctgcccttcgccgaggatatactctcagccgccttcatgtacgggaatcgggtgttcacggagtacccgcaagacatcgtggactacttcaagaactcctgccccgccggatacacatgggaccgttccttcctcttcgaggacggagccgtttgcatctgcaacgcggacatcaccgtgtccgtcgaggagaactgcatgtaccacgagtcaaagttctatggagtgaacttcccggccgatggtcccgtgatgaagaaaatgacggacaactgggagccgtcgtgcgagaaaatcattcccgtcccaaaacagggaatcctcaagggcgacgtgtcgatgtacctacttctcaaggacggtggacggctacggtgccagttcgacactgtttacaaggcgaagtcggtgccgaggaagatgccggactggcactttatccagcacaagctgacaagggaggacagaagcgacgctaagaaccagaaatggcacctcaccgagcacgccatcgccagtggctctgcgctgcccgggtgaccctgcaatgtgaccctagacttgtccatcttctggattggccaacttaattaatgtatgaaataaaaggatgcacacatagtgacatgctaatcactataatgtgggcatcaaagttgtgtgttatgtgtaattactaattatctgaataagagaaagagatcatccatatttcttatcctaaatgaatgtcacgtgtctttataattctttgatgaaccagatgcattttattaaccaattccatatacatataaatattaatcatatataattaatatcaattgggttagcaaaacaaatctagtctaggtgtgttttgctaattattgggggatagtgcaaaaagaaatctacgttctcaataattcagatagaaaacttaataaagtgagataatttacatagattgcttttatcctttgatatatgtgaaaccatgcatgatataaggaaaatagatagagaaataattttttacatcgttgaatatgtaaacaatttaattcaagaagctaggaatataaatattgaggagtttatgattattattattattttgatgttcaatgaagttttttttaatttcatatgaagtatacaaaaattcttcatagatttttgtttctatgccgtagttatctttaatatatttgtggttgaagaaatttattgctagaaacgaatggattgtcaatttttttttaaagcaaatatatatgaaattatactgtatattattttagtcatgattaaaatgtggccttaattgaatcatctttctcattcattttttcaaaagcatatcaggatgattgatatttatctattttaaaaattaatttaagggttcaaattaaatttaacttaaaagtgtcctaaccgtagttaaaggtttactttaaaaaaatactatgaaaaatctaatcttctatgaatcgagggcccggccgtgacggccacgagcgaactcctgcaggcgataaaaatgttttaaacgatatatattataaaaaaaaacgtttcaaaaataaatacaaaaatgtttttaaatatatataatttaactcattaaagaaaataaaaatgcaagtgcggtgacaagacaagctaaaagttgcaaaagaaatggcagggctataaggctcacctactcctggatttaccaaattttggttcgtccctatactcgaaaaataaaacaaaataaatttcagtatcttcgtttttgtatgctttgactgtgaggcgaggccaactttcttcttctgtctgagatgaattttgtttgcctcctgtgaaggatgtatcattcaaagtgaatgttttgcaactgccagtagtcccacatcgaccaaatattcttattacagtgtgtttatatagcacctggagaaggaatgggttgtttcaaagattaaataatttctactaagtgtagattgccgttaatttgagagtccaagtaatttctactaagtgtagatttttttttgcggccgcacaacaaacgcgccggcga

SEQ ID NO: 138 - DNA, 22 bp, synthetic construct
  misc_feature 1..22: note = aadA specific primer for first strand synthesis
  source 1..22: mol_type = other DNA
atttgccgactaccttggtgat

SEQ ID NO: 139 - DNA, 12796 bp, synthetic construct
  misc_feature 1..12796: note = pWISE3899 Full Plasmid Sequence
  source 1..12796: mol_type = other DNA
cggtgcctaatgagtgagctaacttacattaattgcgttgcgccccgagagcgttcaccgacaaacaacagataaaacgaaaggcccagtctttcgactgagcctttcgttttatttgatgcctggttacctcgaaagcccgctgcgcgagcggtcacgcgatgaggcatccagctccgctcgggtgcggttatagacctcattgatatttttctcgaaggattcgtttgtcgtcagaaggcccactgcgttagggccgcctctggcgaggctggccgaagagccaccactgctgccgcccgaatcctgtttgatccgacgcttcttgctaccagcagaataaatgccggagttcgcggcaatagcggacgggatcggatttccatccttgaggaggccctgcatcgccttgacgatcaattcgcagtcggagttcgttgcgaatatcgggatggtgagttccatgttcaggtagctgcgccaggccgccaccggcagttcaacgccgcccacggtctgcgtcgcaactttgggaacctcgaccttgatggtgtacttccgcttctgggccgatgactggcggacggagcaggtcactttatacgcttgggaccgcgagttgctggagatccattccgccactccattggcaaaattcgagggggctacggtgacatcacccgtaccgccgttgtcgaccaggacgaattgagtgaaattgctggcgtcctgcttgatgcggcgcttcttggacccgctcatggtacctccccatctccccaagctcataaccaacacagccacttcggtcggaagaaatgctgtcatctgatgttcacgattatcgggagggtcggttactctaggatttttgttttcttcttttcgatttcatttgaagcgaaaacggctttccatgcacttaagggtgcgccgacgaaagatggctctctaagacaacggcgaggatctagaatgccgtcgaagtgaaattccagggcggaatgaacgggggatggttccaataaactgtggcacttcgcaggctccgatcagggtgtcgatcgcgccatttgcgtggcgagggtatccgcctatgccgactatcctatgtccgagctcagcgaacatatgtcttgttcttcgaagacggtatcgaagacctccagcagataatcgccaaccttcgggtctcagaagacgcaccgccacaaccgactgcccaaagcgattgcgagaaaccatagctataggcgcgccgaacagacgtgctgattaccctggtcgagtctccttaattaacaaaaaacccctcaagacccgtttagaggccccaaggggttatgctagttattgctcagcggaatctacacttagtagaaattagggaacacgagcgacatgggtgatcctcatgtcgctcgtggcacatgggtgatcctcatgtgctccccttggactctcaaattaacggcaatctacacttagtagaaattatttaatctttgaaacgctagcattatacctaggactgagctagctgtcaacaattggggatgagattatcaaaaaggatcttcacctagatccttttaaattaaaaatgaagttttaaatcaatctaaagtatatatgtgtaacattggtctagtgattggatccggagactcgaccagggtaatcagcacgtctgttcggcgcgcctatagctatggtttctcgcaatcgctttgggcagtcggttgtggcggtgcgtcttctgagacccgaaggttggcgattatctgctggaggtcttcgataccgtcttcgaagaacaagacatatgttcgctgagctcggacataggatagtcggcataggcggataccctcgccacgcaaatggcgcgatcgacaccctgatcggagcctgcgaagtgccacagtttattggaaccatcccccgttcattccgccctggaatttcacttcgacggcattctagatcctcgccgttgtcttagagagccatctttcgtcggcgcacccttaagtgcatggaaagccgttttcgcttcaaatgaaatcgaaaagaagaaaacaaaaatcctagagtaaccgaccctcccgataatcgtgaacatcagatgacagcatttcttccgaccgaagtggctgtgttggttatgagcttggggagatggggaggtaccatgagcggctccaagaagcgccgcatcaagcaagattcaaagctggagaagttcaccaactgctactcgctgagcaagacgctgcggttcaaggccatccccgtgggcaagacccaggagaacatcgacaacaagcgcctcctggtcgaggacgagaagcgcgccgaggactacaagggcgtcaagaagctcctggaccggtattacctcagcttcatcaacgacgtgctgcactcgatcaagctcaagaacctgaacaactacatcagcctgttccgcaagaaaacgcgcaccgagaaggagaacaaagagctggagaacctggagatcaacctgcggaaggagattgcgaaagctttcaagggcaacgagggctacaagtcgctcttcaagaaagacataatcgagaccatcctgccggagttcctggacgacaaggacgagatcgcgctcgtcaactcgttcaacgggttcactacggccttcacgggtttcttcgataaccgggagaatatgtttagcgaggaggccaagtccacctccattgcgttccgctgcatcaacgagaacctgacccgctacatcagcaacatggacatcttcgagaaggtggacgccatcttcgacaagcacgaggtccaggagatcaaggagaagattctgaactcggactacgacgtggaagacttcttcgagggcgagtttttcaacttcgtcctgacccaggaggggatcgacgtttataacgccatcatcggcgggttcgtcacggagtcgggcgaaaagatcaagggcctgaacgagtatattaacctgtacaaccagaagacaaagcagaagctgccgaagttcaagccgctgtacaagcaagtcctgtccgaccgcgagtcgctgtcgttctacggcgaaggctacacctcggacgaggaggtgctggaggtgttccgcaacaccctgaacaagaatagcgaaatttttagctccattaagaagctcgagaagctgttcaagaacttcgacgagtacagcagcgccgggatcttcgtcaagaacggccccgcgatcagcaccatctcgaaggacatcttcggcgagtggaacgtcatccgggacaagtggaacgccgagtacgacgacattcaccttaaaaagaaggctgttgtgacggagaagtacgaggacgaccggcgcaagtcgttcaaaaagatcggctccttctccctggagcagctccaggagtacgccgacgccgacctctcggtcgtcgagaagctcaaggagatcatcattcagaaggtggacgaaatttacaaagtgtacggctccagcgagaagctgttcgacgccgacttcgtgctggaaaagtcgctcaagaaaaacgacgccgtggtggccatcatgaaggacttgctggacagcgtgaagtcgttcgagaactacattaaggcgttctttggcgagggcaaggagaccaaccgcgacgagtcgttctacggcgacttcgtgctcgcgtacgacatcctgctcaaggtggatcacatctacgacgcgatccgcaactacgtcacgcagaagccgtactcgaaggacaagttcaagctgtacttccagaacccgcagttcatgggcgggtgggacaaggacaaggaaacggactaccgcgcgaccatcctgcggtacggcagcaagtattatctggcgatcatggacaaaaaatatgccaagtgcctccagaaaatcgacaaggacgacgtgaacggcaactacgagaagattaattacaagctgctccccggccccaacaagatgctcccgaaggtgttctttagcaagaagtggatggcctactacaacccgagcgaggacatccagaagatctataagaatggcaccttcaagaagggagacatgtttaacctcaacgactgccacaagctgattgacttcttcaaggactcgatctcgcgctacccgaagtggtcgaacgcctacgacttcaacttcagcgaaacggagaaatacaaagacatcgcgggcttctaccgcgaggtcgaggagcaaggctacaaggtcagcttcgagtccgccagcaagaaggaggtggacaagctggtggaggagggcaagctctacatgtttcagatctacaacaaggattttagcgacaagtcgcacggcacgccgaacctgcacacgatgtacttcaagctgctgttcgacgagaacaaccacggccagatccggctgtcgggcggtgcggagctgttcatgcgccgggcgtcgctcaagaaggaagagctggtcgtccacccggccaacagccccatcgccaacaagaaccccgacaaccccaagaaaacgacgacactcagctatgatgtctataaagacaagcgcttctcggaggaccagtacgagctgcacatccccatcgccatcaacaagtgccccaagaacatcttcaagatcaacacggaggtccgcgtgctcctcaagcacgacgacaacccgtacgtcatcggcatcgaccggggcgagcgcaacctgctgtacatcgtcgtcgtcgatggcaagggcaacatcgtggagcagtattccctgaacgagatcatcaacaacttcaacggcatccgcatcaagaccgactaccactccctcctcgacaagaaggagaaagagcgcttcgaggcccgccagaactggacctccatcgagaacatcaaggagcttaaggcgggctacatctcccaagtcgtccacaagatctgcgagctggtcgagaagtacgacgcggtgatcgccctggaagacctgaactccggcttcaagaactcccgcgtaaaggtggagaagcaagtgtaccagaagttcgagaagatgctgatcgacaagctgaactacatggtggacaagaaatcgaacccgtgcgcgaccggcggcgcgctcaagggctaccagatcacgaacaagttcgagtcgttcaagtccatgagcacgcagaacggctttatcttctacatcccggcctggctgacgtcgaagatcgacccctcgaccggcttcgtgaacctgctcaagaccaagtatactagcattgccgactccaagaaattcatctcgtccttcgaccgcatcatgtacgtcccggaggaggacctttttgagttcgccctcgactacaagaacttcagccgcaccgacgccgactacatcaagaagtggaagctgtactcgtacgggaaccgcatccgtatttttcgcaacccgaagaaaaataatgtcttcgactgggaggaggtgtgcctgaccagcgcctacaaggagctgttcaacaagtacggcatcaactaccaacagggcgacatccgggcccttctctgcgagcagagcgacaaggcgttctactcgtcgttcatggccctgatgagcctgatgctccagatgaggaacagcatcaccggccgcaccgacgtggacttcctcatcagccccgtcaagaactcggacggcatattttatgactcgcggaactacgaggcccaggagaacgccatcctgcccaagaacgccgacgccaacggcgcgtacaacatcgcccgcaaggtgctctgggccatcggccagttcaagaaggcggaagacgagaagctggacaaggtgaagatcgccatctccaacaaggagtggctggagtacgcgcagacgtccgtcaagcacggctccaagaaacggcggatcaaacaagattccggtggaagttccggaggttcaagcgggtctgaaacgccgggcaccagcgagtcggcgaccccggaaagcagcggtggttcttccggcggtagcatgcccgatcgagctcaagttatcattcgcattgtgccgggaggtggcaccaagacccttcaacaaattatcaatcagttggagtatctatcccggaagggcaggctggagctgcagcgttcagcccgacatctcgatattcccctgccaccggatcaaatccacgaacttgcccgaagctgggttcaagagactggaacttatgacgaaagtcagccagacgaggaaaggcaacaggagttgaccacccatattattgtaagcttccccgccggtacaagccaggtagcggcttatgcggcgagccgggagtgggcagccgagatgtttgggtcaggcgcaggggggggccgatacaactatcttacggccttccacatcgatcgcgaccacccacatctgcatgtcgtcgtcaatcggcgcgaacttttaggacacggctggctgaagatatctcggcgccatccccaactgaattacgacgccctgcgcataaagatggccgagatttcacttcgtcatggcattgccctcgatgcgagccgacgagcagaacgtggcatcaccgagcggccgatcacttatgcccaatatcggcgccttgagcgggagcaggctcgccaaatccgtttcgaagacgcggatttggaacagtcgtcgccgcaaggagatcatccagaattcagccaacctttcgatacatccccatttgaagcatccgcgggcggaccggaggacatgcctcggcccaacaatcggcagaatgagtcgcaagttcatctccaggagccagctggtgtcagcaacgaagccggtgtccttgtgcgggttgcattggaaacggagcgccttgctcaaccattcgtttccgaaaccattctcgcggacgacatagggagcggctcttcgcgtgttgccgagggccgtgtggagagcgcaaaccgcactcccgatattcctcgcgcagcaactgaagctgccacgcacacgacacacgaccggcagcggcgtgcaaagcgtcctcatgatgacgacggagggccgagtggagcaaaacgtgtgacattggaaggcatcgcggttgggccccaggcgaacgccggcgaacaggatggcagtagtggccccttagtacggcaagctggaacgtcacggccatctccaccgacggccacgacgcgggccagcaccgcaaccgattcattgtctgctacagcccacctccagcaacggagaggtgtcctttcaaagcgtccgcgtgaagatgatgatggagaaccgagtgaacgcaaacgcgagagagatgagcgcagcaaggacgggcgtgggggaaataggagatagtctagaccaggcatcaaataaaacgaaaggctcagtcgaaagactgggcctttcgttttatctgttgtttgtcggtgaacgctctctactagagtcacactggctcaccttcgggtgggcctttctgcgtttatagtacgatatcccaatggcgcgccgagcttggctcgagcatggtcatagctgtttcctgtgtgaaattgttatccgctcacaattccacacaacatacgagccggaagcataaagtgtaaagcctggggtgcctaatgagtgagctaactcacattaattgcgttgcgctcactgcccgctttccagtcgggaaacctgtcgtgccagctgcattaatgaatcggccaacgcgcggggagaggcggtttgcgtattgggcgctgttccgcttcctcgctcactgactcgctgcgctcggtcgttcggctgcggcgagcggtatcagctcactcaaaggcggtaatacggttatccacagaatcaggggataacgcaggaaagaacatgtgagcaaaaggccagcaaaaggccaggaaccgtaaaaaggccgcgttgctggcgtttttccataggctccgcccccctgacgagcatcacaaaaatcgacgctcaagtcagaggtggcgaaacccgacaggactataaagataccaggcgtttccccctggaagctccctcgtgcgctctcctgttccgaccctgccgcttaccggatacctgtccgcctttctcccttcgggaagcgtggcgctttctcatagctcacgctgtaggtatctcagttcggtgtaggtcgttcgctccaagctgggctgtgtgcacgaaccccccgttcagcccgaccgctgcgccttatccggtaactatcgtcttgagtccaacccggtaagacacgacttatcgccactggcagcagccactggtaacaggattagcagagcgaggtatgtaggcggtgctacagagttcttgaagtggtggcctaactacggctacactagaagaacagtatttggtatctgcgctctgctgaagccagttaccttcggaaaaagagttggtagctcttgatccggcaaacaaaccaccgctggtagcggtggtttttttgtttgcaagcagcagattacgcgcagaaaaaaaggatctcaagaagatcctttgatcttttctacggggtctgacgctcagtggaacgaaaactcacgttaagggattttggtcatgagattatcaaaaaggatcttcacctagatccttttaaattaaaaatgaagttttaaatcaatctaaagtatatatgagtaaacttggtctgacagttagaaaaactcatcgagcatcaaatgaaactgcaatttattcatatcaggattatcaataccatatttttgaaaaagccgtttctgtaatgaaggagaaaactcaccgaggcagttccataggatggcaagatcctggtatcggtctgcgattccgactcgtccaacatcaatacaacctattaatttcccctcgtcaaaaataaggttatcaagtgagaaatcaccatgagtgacgactgaatccggtgagaatggcaaaagtttatgcatttctttccagacttgttcaacaggccagccattacgctcgtcatcaaaatcactcgcatcaaccaaaccgttattcattcgtgattgcgcctgagcgaaacgaaatacgcgatcgctgttaaaaggacaattacaaacaggaatcgaatgcaaccggcgcaggaacactgccagcgcatcaacaatattttcacctgaatcaggatattcttctaatacctggaatgctgttttcccagggatcgcagtggtgagtaaccatgcatcatcaggagtacggataaaatgcttgatggtcggaagaggcataaattccgtcagccagtttagtctgaccatctcatctgtaacatcattggcaacgctacctttgccatgtttcagaaacaactctggcgcatcgggcttcccatacaatcgatagattgtcgcacctgattgcccgacattatcgcgagcccatttatacccatataaatcagcatccatgttggaatttaatcgcggcctagagcaagacgtttcccgttgaatatggctcatactcttcctttttcaatattattgaagcatttatcagggttattgtctcatgagcggatacatatttgaatgtatttagaaaaataaacaaataggggttccgcgcacatttccccgaaaagtgccacctgacgtctaagaaaccattattatcatgacattaacctataaaaataggcgtatcacgaggcccttttgtctcgcgcgtttcggtgatgacggtgaaaacctctgacacatgcagctcccggagactgtcacagcttgtctgtaagcggatgccgggagcagacaagcccgtcagggcgcgtcagcgggtgttggcgggtgtcggggctggcttaactatgcggcatcagagcagattgtactgagagtgcaccatatgcggtgtgaaataccgcacagatgcgtaaggagaaaataccgcatcaggcgccattcgccattcaggctgcgcaactgttgggaagggcgatcggtgcgggcctcttcgctattacgccagctggcgaaagggggatgtgctgcaaggcgattaagttgggtaacgccagggttttcccagtcacgacgttgtaaaacgacggccagtgaattgacgcgttgcggctgcatgaaatcctggccggtttgtctgatgccaagctggcggcctggccggccagcttggccgctgaagaaaccgagcgccgccgtctaaaaaggtgatgtgtatttgagtaaaacagcttgcgtcatgcggtcgctgcgtatatgatgcgatgagtaaataaacaaatacgcaaggggaacgcatgaaggttatcgctgtacttaaccagaaaggcgggtcaggcaagacgaccatcgcaacccatctagcccgcgccctgcaactcgccggggccgatgttctgttagtcgattccgatccccagggcagtgcccgcgattgggcggccgtgcgggaagatcaaccgctaaccgttgtcggcatcgaccgcccgacgattgaccgcgacgtgaaggccatcggccggcgcgacttcgtagtgatcgacggagcgccccaggcggcggacttggctgtgtccgcgatcaaggcagccgacttcgtgctgattccggtgcagccaagcccttacgacatatgggccaccgccgacctggtggagctggttaagcagcgcattgaggtcacggatggaaggctacaagcggcctttgtcgtgtcgcgggcgatcaaaggcacgcgcatcggcggtgaggttgccgaggcgctggccgggtacgagctgcccattcttgagtcccgtatcacgcagcgcgtgagctacccaggcactgccgccgccggcacaaccgttcttgaatcagaacccgagggcgacgctgcccgcgaggtccaggcgctggccgctgaaattaaatcaaaactcatttgagttaatgaggtaaagagaaaatgagcaaaagcacaaacacgctaagtgccggccgtccgagcgcacgcagcagcaaggctgcaacgttggccagcctggcagacacgccagccatgaagcgggtcaactttcagttgccggcggaggatcacaccaagctgaagatgtacgcggtacgccaaggcaagaccattaccgagctgctatctgaatacatcgcgcagctaccagagtaaatgagcaaatgaataaatgagtagatgaattttagcggctaaaggaggcggcatggaaaatcaagaacaaccaggcaccgacgccgtggaatgccccatgtgtggaggaacgggcggttggccaggcgtaagcggctgggttgtctgccggccctgcaatggcactggaacccccaagcccgaggaatcggcgtgagcggtcgcaaaccatccggcccggtacaaatcggcgcggcgctgggtgatgacctggtggagaagttgaaggccgcgcaggccgcccagcggcaacgcatcgaggcagaagcacgccccggtgaatcgtggcaagcggccgctgatcgaatccgcaaagaatcccggcaaccgccggcagccggtgcgccgtcgattaggaagccgcccaagggcgacgagcaaccagattttttcgttccgatgctctatgacgtgggcacccgcgatagtcgcagcatcatggacgtggccgttttccgtctgtcgaagcgtgaccgacgagctggcgaggtgatccgctacgagcttccagacgggcacgtagaggtttccgcagggccggccggcatggccagtgtgtgggattacgacctggtactgatggcggtttcccatctaaccgaatccatgaaccgataccgggaagggaagggagacaagcccggccgcgtgttccgtccacacgttgcggacgtactcaagttctgccggcgagccgatggcggaaagcagaaagacgacctggtagaaacctgcattcggttaaacaccacgcacgttgccatgcagcgtacgaagaaggccaagaacggccgcctggtgacggtatccgagggtgaagccttgattagccgctacaagatcgtaaagagcgaaaccgggcggccggagtacatcgagatcgagctagctgattggatgtaccgcgagatcacagaaggcaagaacccggacgtgctgacggttcaccccgattactttttgatcgatcccggcatcggccgttttctctaccgcctggcacgccgcgccgcaggcaaggcagaagccagatggttgttcaagacgatctacgaacgcagtggcagcgccggagagttcaagaagttctgtttcaccgtgcgcaagctgatcgggtcaaatgacctgccggagtacgatttgaaggaggaggcggggcaggctggcccgatcctagtcatgcgctaccgcaacctgatcgagggcgaagcatccgccggttcctaatgtacggagcagatgctagggcaaattgccctagcaggggaaaaaggtcgaaaaggtctctttcctgtggatagcacgtacattgggaacccaaagccgtacattgggaaccggaacccgtacattgggaacccaaagccgtacattgggaaccggtcacacatgtaagtgactgatataaaagagaaaaaaggcgatttttccgcctaaaactctttaaaacttattaaaactcttaaaacccgcctggcctgtgcatatgctagtcatgccccgcgcccaccggaaggagctgactgggttgaaggctctcaagggcatcggtcgagatcc

SEQ ID NO: 140 - DNA, 12796 bp, synthetic construct
  misc_feature 1..12796: note = pWISE3900 Full Plasmid Sequence
  source 1..12796: mol_type = other DNA
cggtgcctaatgagtgagctaacttacattaattgcgttgcgccccgagagcgttcaccgacaaacaacagataaaacgaaaggcccagtctttcgactgagcctttcgttttatttgatgcctggttacctcgaaagcccgctgcgcgagcggtcacgcgatgaggcatccagctccgctcgggtgcggttatagacctcattgatatttttctcgaaggattcgtttgtcgtcagaaggcccactgcgttagggccgcctctggcgaggctggccgaagagccaccactgctgccgcccgaatcctgtttgatccgacgcttcttgctaccagcagaataaatgccggagttcgcggcaatagcggacgggatcggatttccatccttgaggaggccctgcatcgccttgacgatcaattcgcagtcggagttcgttgcgaatatcgggatggtgagttccatgttcaggtagctgcgccaggccgccaccggcagttcaacgccgcccacggtctgcgtcgcaactttgggaacctcgaccttgatggtgtacttccgcttctgggccgatgactggcggacggagcaggtcactttatacgcttgggaccgcgagttgctggagatccattccgccactccattggcaaaattcgagggggctacggtgacatcacccgtaccgccgttgtcgaccaggacgaattgagtgaaattgctggcgtcctgcttgatgcggcgcttcttggacccgctcatggtacctccccatctccccaagctcataaccaacacagccacttcggtcggaagaaatgctgtcatctgatgttcacgattatcgggagggtcggttactctaggatttttgttttcttcttttcgatttcatttgaagcgaaaacggctttccatgcacttaagggtgcgccgacgaaagatggctctctaagacaacggcgaggatctagaatgccgtcgaagtgaaattccagggcggaatgaacgggggatggttccaataaactgtggcacttcgcaggctccgatcagggtgtcgatcgcgccatttgcgtggcgagggtatccgcctatgccgactatcctatgtccgagctcagcgaacatatgtcttgttcttcgaagacggtatcgaagacctccagcagataatcgccaaccttcgggtctcagaagacgcaccgccacaaccgactgcccaaagcgattgcgagaaaccatagctataggcgcgccgaacagacgtgctgattaccctggtcgagtctccttaattaacaaaaaacccctcaagacccgtttagaggccccaaggggttatgctagttattgctcagcggaatctacacttagtagaaattagggaacacgagcgacatgggtgatcctcatgtcgctcgtggcacatgggtgatcctcatgtgctcccgctcgaggtcttcgttgggaactatctacacttagtagaaattatttaatctttgaaacgctagcattatacctaggactgagctagctgtcaacaattggggatgagattatcaaaaaggatcttcacctagatccttttaaattaaaaatgaagttttaaatcaatctaaagtatatatgtgtaacattggtctagtgattggatccggagactcgaccagggtaatcagcacgtctgttcggcgcgcctatagctatggtttctcgcaatcgctttgggcagtcggttgtggcggtgcgtcttctgagacccgaaggttggcgattatctgctggaggtcttcgataccgtcttcgaagaacaagacatatgttcgctgagctcggacataggatagtcggcataggcggataccctcgccacgcaaatggcgcgatcgacaccctgatcggagcctgcgaagtgccacagtttattggaaccatcccccgttcattccgccctggaatttcacttcgacggcattctagatcctcgccgttgtcttagagagccatctttcgtcggcgcacccttaagtgcatggaaagccgttttcgcttcaaatgaaatcgaaaagaagaaaacaaaaatcctagagtaaccgaccctcccgataatcgtgaacatcagatgacagcatttcttccgaccgaagtggctgtgttggttatgagcttggggagatggggaggtaccatgagcggctccaagaagcgccgcatcaagcaagattcaaagctggagaagttcaccaactgctactcgctgagcaagacgctgcggttcaaggccatccccgtgggcaagacccaggagaacatcgacaacaagcgcctcctggtcgaggacgagaagcgcgccgaggactacaagggcgtcaagaagctcctggaccggtattacctcagcttcatcaacgacgtgctgcactcgatcaagctcaagaacctgaacaactacatcagcctgttccgcaagaaaacgcgcaccgagaaggagaacaaagagctggagaacctggagatcaacctgcggaaggagattgcgaaagctttcaagggcaacgagggctacaagtcgctcttcaagaaagacataatcgagaccatcctgccggagttcctggacgacaaggacgagatcgcgctcgtcaactcgttcaacgggttcactacggccttcacgggtttcttcgataaccgggagaatatgtttagcgaggaggccaagtccacctccattgcgttccgctgcatcaacgagaacctgacccgctacatcagcaacatggacatcttcgagaaggtggacgccatcttcgacaagcacgaggtccaggagatcaaggagaagattctgaactcggactacgacgtggaagacttcttcgagggcgagtttttcaacttcgtcctgacccaggaggggatcgacgtttataacgccatcatcggcgggttcgtcacggagtcgggcgaaaagatcaagggcctgaacgagtatattaacctgtacaaccagaagacaaagcagaagctgccgaagttcaagccgctgtacaagcaagtcctgtccgaccgcgagtcgctgtcgttctacggcgaaggctacacctcggacgaggaggtgctggaggtgttccgcaacaccctgaacaagaatagcgaaatttttagctccattaagaagctcgagaagctgttcaagaacttcgacgagtacagcagcgccgggatcttcgtcaagaacggccccgcgatcagcaccatctcgaaggacatcttcggcgagtggaacgtcatccgggacaagtggaacgccgagtacgacgacattcaccttaaaaagaaggctgttgtgacggagaagtacgaggacgaccggcgcaagtcgttcaaaaagatcggctccttctccctggagcagctccaggagtacgccgacgccgacctctcggtcgtcgagaagctcaaggagatcatcattcagaaggtggacgaaatttacaaagtgtacggctccagcgagaagctgttcgacgccgacttcgtgctggaaaagtcgctcaagaaaaacgacgccgtggtggccatcatgaaggacttgctggacagcgtgaagtcgttcgagaactacattaaggcgttctttggcgagggcaaggagaccaaccgcgacgagtcgttctacggcgacttcgtgctcgcgtacgacatcctgctcaaggtggatcacatctacgacgcgatccgcaactacgtcacgcagaagccgtactcgaaggacaagttcaagctgtacttccagaacccgcagttcatgggcgggtgggacaaggacaaggaaacggactaccgcgcgaccatcctgcggtacggcagcaagtattatctggcgatcatggacaaaaaatatgccaagtgcctccagaaaatcgacaaggacgacgtgaacggcaactacgagaagattaattacaagctgctccccggccccaacaagatgctcccgaaggtgttctttagcaagaagtggatggcctactacaacccgagcgaggacatccagaagatctataagaatggcaccttcaagaagggagacatgtttaacctcaacgactgccacaagctgattgacttcttcaaggactcgatctcgcgctacccgaagtggtcgaacgcctacgacttcaacttcagcgaaacggagaaatacaaagacatcgcgggcttctaccgcgaggtcgaggagcaaggctacaaggtcagcttcgagtccgccagcaagaaggaggtggacaagctggtggaggagggcaagctctacatgtttcagatctacaacaaggattttagcgacaagtcgcacggcacgccgaacctgcacacgatgtacttcaagctgctgttcgacgagaacaaccacggccagatccggctgtcgggcggtgcggagctgttcatgcgccgggcgtcgctcaagaaggaagagctggtcgtccacccggccaacagccccatcgccaacaagaaccccgacaaccccaagaaaacgacgacactcagctatgatgtctataaagacaagcgcttctcggaggaccagtacgagctgcacatccccatcgccatcaacaagtgccccaagaacatcttcaagatcaacacggaggtccgcgtgctcctcaagcacgacgacaacccgtacgtcatcggcatcgaccggggcgagcgcaacctgctgtacatcgtcgtcgtcgatggcaagggcaacatcgtggagcagtattccctgaacgagatcatcaacaacttcaacggcatccgcatcaagaccgactaccactccctcctcgacaagaaggagaaagagcgcttcgaggcccgccagaactggacctccatcgagaacatcaaggagcttaaggcgggctacatctcccaagtcgtccacaagatctgcgagctggtcgagaagtacgacgcggtgatcgccctggaagacctgaactccggcttcaagaactcccgcgtaaaggtggagaagcaagtgtaccagaagttcgagaagatgctgatcgacaagctgaactacatggtggacaagaaatcgaacccgtgcgcgaccggcggcgcgctcaagggctaccagatcacgaacaagttcgagtcgttcaagtccatgagcacgcagaacggctttatcttctacatcccggcctggctgacgtcgaagatcgacccctcgaccggcttcgtgaacctgctcaagaccaagtatactagcattgccgactccaagaaattcatctcgtccttcgaccgcatcatgtacgtcccggaggaggacctttttgagttcgccctcgactacaagaacttcagccgcaccgacgccgactacatcaagaagtggaagctgtactcgtacgggaaccgcatccgtatttttcgcaacccgaagaaaaataatgtcttcgactgggaggaggtgtgcctgaccagcgcctacaaggagctgttcaacaagtacggcatcaactaccaacagggcgacatccgggcccttctctgcgagcagagcgacaaggcgttctactcgtcgttcatggccctgatgagcctgatgctccagatgaggaacagcatcaccggccgcaccgacgtggacttcctcatcagccccgtcaagaactcggacggcatattttatgactcgcggaactacgaggcccaggagaacgccatcctgcccaagaacgccgacgccaacggcgcgtacaacatcgcccgcaaggtgctctgggccatcggccagttcaagaaggcggaagacgagaagctggacaaggtgaagatcgccatctccaacaaggagtggctggagtacgcgcagacgtccgtcaagcacggctccaagaaacggcggatcaaacaagattccggtggaagttccggaggttcaagcgggtctgaaacgccgggcaccagcgagtcggcgaccccggaaagcagcggtggttcttccggcggtagcatgcccgatcgagctcaagttatcattcgcattgtgccgggaggtggcaccaagacccttcaacaaattatcaatcagttggagtatctatcccggaagggcaggctggagctgcagcgttcagcccgacatctcgatattcccctgccaccggatcaaatccacgaacttgcccgaagctgggttcaagagactggaacttatgacgaaagtcagccagacgaggaaaggcaacaggagttgaccacccatattattgtaagcttccccgccggtacaagccaggtagcggcttatgcggcgagccgggagtgggcagccgagatgtttgggtcaggcgcaggggggggccgatacaactatcttacggccttccacatcgatcgcgaccacccacatctgcatgtcgtcgtcaatcggcgcgaacttttaggacacggctggctgaagatatctcggcgccatccccaactgaattacgacgccctgcgcataaagatggccgagatttcacttcgtcatggcattgccctcgatgcgagccgacgagcagaacgtggcatcaccgagcggccgatcacttatgcccaatatcggcgccttgagcgggagcaggctcgccaaatccgtttcgaagacgcggatttggaacagtcgtcgccgcaaggagatcatccagaattcagccaacctttcgatacatccccatttgaagcatccgcgggcggaccggaggacatgcctcggcccaacaatcggcagaatgagtcgcaagttcatctccaggagccagctggtgtcagcaacgaagccggtgtccttgtgcgggttgcattggaaacggagcgccttgctcaaccattcgtttccgaaaccattctcgcggacgacatagggagcggctcttcgcgtgttgccgagggccgtgtggagagcgcaaaccgcactcccgatattcctcgcgcagcaactgaagctgccacgcacacgacacacgaccggcagcggcgtgcaaagcgtcctcatgatgacgacggagggccgagtggagcaaaacgtgtgacattggaaggcatcgcggttgggccccaggcgaacgccggcgaacaggatggcagtagtggccccttagtacggcaagctggaacgtcacggccatctccaccgacggccacgacgcgggccagcaccgcaaccgattcattgtctgctacagcccacctccagcaacggagaggtgtcctttcaaagcgtccgcgtgaagatgatgatggagaaccgagtgaacgcaaacgcgagagagatgagcgcagcaaggacgggcgtgggggaaataggagatagtctagaccaggcatcaaataaaacgaaaggctcagtcgaaagactgggcctttcgttttatctgttgtttgtcggtgaacgctctctactagagtcacactggctcaccttcgggtgggcctttctgcgtttatagtacgatatcccaatggcgcgccgagcttggctcgagcatggtcatagctgtttcctgtgtgaaattgttatccgctcacaattccacacaacatacgagccggaagcataaagtgtaaagcctggggtgcctaatgagtgagctaactcacattaattgcgttgcgctcactgcccgctttccagtcgggaaacctgtcgtgccagctgcattaatgaatcggccaacgcgcggggagaggcggtttgcgtattgggcgctgttccgcttcctcgctcactgactcgctgcgctcggtcgttcggctgcggcgagcggtatcagctcactcaaaggcggtaatacggttatccacagaatcaggggataacgcaggaaagaacatgtgagcaaaaggccagcaaaaggccaggaaccgtaaaaaggccgcgttgctggcgtttttccataggctccgcccccctgacgagcatcacaaaaatcgacgctcaagtcagaggtggcgaaacccgacaggactataaagataccaggcgtttccccctggaagctccctcgtgcgctctcctgttccgaccctgccgcttaccggatacctgtccgcctttctcccttcgggaagcgtggcgctttctcatagctcacgctgtaggtatctcagttcggtgtaggtcgttcgctccaagctgggctgtgtgcacgaaccccccgttcagcccgaccgctgcgccttatccggtaactatcgtcttgagtccaacccggtaagacacgacttatcgccactggcagcagccactggtaacaggattagcagagcgaggtatgtaggcggtgctacagagttcttgaagtggtggcctaactacggctacactagaagaacagtatttggtatctgcgctctgctgaagccagttaccttcggaaaaagagttggtagctcttgatccggcaaacaaaccaccgctggtagcggtggtttttttgtttgcaagcagcagattacgcgcagaaaaaaaggatctcaagaagatcctttgatcttttctacggggtctgacgctcagtggaacgaaaactcacgttaagggattttggtcatgagattatcaaaaaggatcttcacctagatccttttaaattaaaaatgaagttttaaatcaatctaaagtatatatgagtaaacttggtctgacagttagaaaaactcatcgagcatcaaatgaaactgcaatttattcatatcaggattatcaataccatatttttgaaaaagccgtttctgtaatgaaggagaaaactcaccgaggcagttccataggatggcaagatcctggtatcggtctgcgattccgactcgtccaacatcaatacaacctattaatttcccctcgtcaaaaataaggttatcaagtgagaaatcaccatgagtgacgactgaatccggtgagaatggcaaaagtttatgcatttctttccagacttgttcaacaggccagccattacgctcgtcatcaaaatcactcgcatcaaccaaaccgttattcattcgtgattgcgcctgagcgaaacgaaatacgcgatcgctgttaaaaggacaattacaaacaggaatcgaatgcaaccggcgcaggaacactgccagcgcatcaacaatattttcacctgaatcaggatattcttctaatacctggaatgctgttttcccagggatcgcagtggtgagtaaccatgcatcatcaggagtacggataaaatgcttgatggtcggaagaggcataaattccgtcagccagtttagtctgaccatctcatctgtaacatcattggcaacgctacctttgccatgtttcagaaacaactctggcgcatcgggcttcccatacaatcgatagattgtcgcacctgattgcccgacattatcgcgagcccatttatacccatataaatcagcatccatgttggaatttaatcgcggcctagagcaagacgtttcccgttgaatatggctcatactcttcctttttcaatattattgaagcatttatcagggttattgtctcatgagcggatacatatttgaatgtatttagaaaaataaacaaataggggttccgcgcacatttccccgaaaagtgccacctgacgtctaagaaaccattattatcatgacattaacctataaaaataggcgtatcacgaggcccttttgtctcgcgcgtttcggtgatgacggtgaaaacctctgacacatgcagctcccggagactgtcacagcttgtctgtaagcggatgccgggagcagacaagcccgtcagggcgcgtcagcgggtgttggcgggtgtcggggctggcttaactatgcggcatcagagcagattgtactgagagtgcaccatatgcggtgtgaaataccgcacagatgcgtaaggagaaaataccgcatcaggcgccattcgccattcaggctgcgcaactgttgggaagggcgatcggtgcgggcctcttcgctattacgccagctggcgaaagggggatgtgctgcaaggcgattaagttgggtaacgccagggttttcccagtcacgacgttgtaaaacgacggccagtgaattgacgcgttgcggctgcatgaaatcctggccggtttgtctgatgccaagctggcggcctggccggccagcttggccgctgaagaaaccgagcgccgccgtctaaaaaggtgatgtgtatttgagtaaaacagcttgcgtcatgcggtcgctgcgtatatgatgcgatgagtaaataaacaaatacgcaaggggaacgcatgaaggttatcgctgtacttaaccagaaaggcgggtcaggcaagacgaccatcgcaacccatctagcccgcgccctgcaactcgccggggccgatgttctgttagtcgattccgatccccagggcagtgcccgcgattgggcggccgtgcgggaagatcaaccgctaaccgttgtcggcatcgaccgcccgacgattgaccgcgacgtgaaggccatcggccggcgcgacttcgtagtgatcgacggagcgccccaggcggcggacttggctgtgtccgcgatcaaggcagccgacttcgtgctgattccggtgcagccaagcccttacgacatatgggccaccgccgacctggtggagctggttaagcagcgcattgaggtcacggatggaaggctacaagcggcctttgtcgtgtcgcgggcgatcaaaggcacgcgcatcggcggtgaggttgccgaggcgctggccgggtacgagctgcccattcttgagtcccgtatcacgcagcgcgtgagctacccaggcactgccgccgccggcacaaccgttcttgaatcagaacccgagggcgacgctgcccgcgaggtccaggcgctggccgctgaaattaaatcaaaactcatttgagttaatgaggtaaagagaaaatgagcaaaagcacaaacacgctaagtgccggccgtccgagcgcacgcagcagcaaggctgcaacgttggccagcctggcagacacgccagccatgaagcgggtcaactttcagttgccggcggaggatcacaccaagctgaagatgtacgcggtacgccaaggcaagaccattaccgagctgctatctgaatacatcgcgcagctaccagagtaaatgagcaaatgaataaatgagtagatgaattttagcggctaaaggaggcggcatggaaaatcaagaacaaccaggcaccgacgccgtggaatgccccatgtgtggaggaacgggcggttggccaggcgtaagcggctgggttgtctgccggccctgcaatggcactggaacccccaagcccgaggaatcggcgtgagcggtcgcaaaccatccggcccggtacaaatcggcgcggcgctgggtgatgacctggtggagaagttgaaggccgcgcaggccgcccagcggcaacgcatcgaggcagaagcacgccccggtgaatcgtggcaagcggccgctgatcgaatccgcaaagaatcccggcaaccgccggcagccggtgcgccgtcgattaggaagccgcccaagggcgacgagcaaccagattttttcgttccgatgctctatgacgtgggcacccgcgatagtcgcagcatcatggacgtggccgttttccgtctgtcgaagcgtgaccgacgagctggcgaggtgatccgctacgagcttccagacgggcacgtagaggtttccgcagggccggccggcatggccagtgtgtgggattacgacctggtactgatggcggtttcccatctaaccgaatccatgaaccgataccgggaagggaagggagacaagcccggccgcgtgttccgtccacacgttgcggacgtactcaagttctgccggcgagccgatggcggaaagcagaaagacgacctggtagaaacctgcattcggttaaacaccacgcacgttgccatgcagcgtacgaagaaggccaagaacggccgcctggtgacggtatccgagggtgaagccttgattagccgctacaagatcgtaaagagcgaaaccgggcggccggagtacatcgagatcgagctagctgattggatgtaccgcgagatcacagaaggcaagaacccggacgtgctgacggttcaccccgattactttttgatcgatcccggcatcggccgttttctctaccgcctggcacgccgcgccgcaggcaaggcagaagccagatggttgttcaagacgatctacgaacgcagtggcagcgccggagagttcaagaagttctgtttcaccgtgcgcaagctgatcgggtcaaatgacctgccggagtacgatttgaaggaggaggcggggcaggctggcccgatcctagtcatgcgctaccgcaacctgatcgagggcgaagcatccgccggttcctaatgtacggagcagatgctagggcaaattgccctagcaggggaaaaaggtcgaaaaggtctctttcctgtggatagcacgtacattgggaacccaaagccgtacattgggaaccggaacccgtacattgggaacccaaagccgtacattgggaaccggtcacacatgtaagtgactgatataaaagagaaaaaaggcgatttttccgcctaaaactctttaaaacttattaaaactcttaaaacccgcctggcctgtgcatatgctagtcatgccccgcgcccaccggaaggagctgactgggttgaaggctctcaagggcatcggtcgagatcc

SEQ ID NO: 141 - DNA, 26 bp, synthetic construct
  misc_feature 1..26: note = Polyubiquitin left flank primer
  source 1..26: mol_type = other DNA
tgctcaggtcctttagcaactacctt

SEQ ID NO: 142 - DNA, 25 bp, synthetic construct
  misc_feature 1..25: note = Polyubiquitin right flank primer
  source 1..25: mol_type = other DNA
ggagaaacatgtgagtagaccactt

SEQ ID NO: 143 - DNA, 11481 bp, synthetic construct
  misc_feature 1..11481: note = pWISE3897 Full Plasmid Sequence
  source 1..11481: mol_type = other DNA
cggtgcctaatgagtgagctaacttacattaattgcgttgcgccccttaattaacaaaaaacccctcaagacccgtttagaggccccaaggggttatgctagttattgctcagcggaatctacacttagtagaaattatatccacatgtgtttttagtaaaatctacacttagtagaaattatttaatctttgaaacgctagcattatacctaggactgagctagctgtcaacaattggggatgagattatcaaaaaggatcttcacctagatccttttaaattaaaaatgaagttttaaatcaatctaaagtatatatgtgtaacattggtctagtgattggatccggagactcgaccagggtaatcagcacgtctgttcggcgcgcctatagctatggtttctcgcaatcgctttgggcagtcggttgtggcggtgcgtcttctgagacccgaaggttggcgattatctgctggaggtcttcgataccgtcttcgaagaacaagacatatgttcgctgagctcggacataggatagtcggcataggcggataccctcgccacgcaaatggcgcgatcgacaccctgatcggagcctgcgaagtgccacagtttattggaaccatcccccgttcattccgccctggaatttcacttcgacggcattctagatcctcgccgttgtcttagagagccatctttcgtcggcgcacccttaagtgcatggaaagccgttttcgcttcaaatgaaatcgaaaagaagaaaacaaaaatcctagagtaaccgaccctcccgataatcgtgaacatcagatgacagcatttcttccgaccgaagtggctgtgttggttatgagcttggggagatggggaggtaccatgagcggctccaagaagcgccgcatcaagcaagattcaaagctggagaagttcaccaactgctactcgctgagcaagacgctgcggttcaaggccatccccgtgggcaagacccaggagaacatcgacaacaagcgcctcctggtcgaggacgagaagcgcgccgaggactacaagggcgtcaagaagctcctggaccggtattacctcagcttcatcaacgacgtgctgcactcgatcaagctcaagaacctgaacaactacatcagcctgttccgcaagaaaacgcgcaccgagaaggagaacaaagagctggagaacctggagatcaacctgcggaaggagattgcgaaagctttcaagggcaacgagggctacaagtcgctcttcaagaaagacataatcgagaccatcctgccggagttcctggacgacaaggacgagatcgcgctcgtcaactcgttcaacgggttcactacggccttcacgggtttcttcgataaccgggagaatatgtttagcgaggaggccaagtccacctccattgcgttccgctgcatcaacgagaacctgacccgctacatcagcaacatggacatcttcgagaaggtggacgccatcttcgacaagcacgaggtccaggagatcaaggagaagattctgaactcggactacgacgtggaagacttcttcgagggcgagtttttcaacttcgtcctgacccaggaggggatcgacgtttataacgccatcatcggcgggttcgtcacggagtcgggcgaaaagatcaagggcctgaacgagtatattaacctgtacaaccagaagacaaagcagaagctgccgaagttcaagccgctgtacaagcaagtcctgtccgaccgcgagtcgctgtcgttctacggcgaaggctacacctcggacgaggaggtgctggaggtgttccgcaacaccctgaacaagaatagcgaaatttttagctccattaagaagctcgagaagctgttcaagaacttcgacgagtacagcagcgccgggatcttcgtcaagaacggccccgcgatcagcaccatctcgaaggacatcttcggcgagtggaacgtcatccgggacaagtggaacgccgagtacgacgacattcaccttaaaaagaaggctgttgtgacggagaagtacgaggacgaccggcgcaagtcgttcaaaaagatcggctccttctccctggagcagctccaggagtacgccgacgccgacctctcggtcgtcgagaagctcaaggagatcatcattcagaaggtggacgaaatttacaaagtgtacggctccagcgagaagctgttcgacgccgacttcgtgctggaaaagtcgctcaagaaaaacgacgccgtggtggccatcatgaaggacttgctggacagcgtgaagtcgttcgagaactacattaaggcgttctttggcgagggcaaggagaccaaccgcgacgagtcgttctacggcgacttcgtgctcgcgtacgacatcctgctcaaggtggatcacatctacgacgcgatccgcaactacgtcacgcagaagccgtactcgaaggacaagttcaagctgtacttccagaacccgcagttcatgggcgggtgggacaaggacaaggaaacggactaccgcgcgaccatcctgcggtacggcagcaagtattatctggcgatcatggacaaaaaatatgccaagtgcctccagaaaatcgacaaggacgacgtgaacggcaactacgagaagattaattacaagctgctccccggccccaacaagatgctcccgaaggtgttctttagcaagaagtggatggcctactacaacccgagcgaggacatccagaagatctataagaatggcaccttcaagaagggagacatgtttaacctcaacgactgccacaagctgattgacttcttcaaggactcgatctcgcgctacccgaagtggtcgaacgcctacgacttcaacttcagcgaaacggagaaatacaaagacatcgcgggcttctaccgcgaggtcgaggagcaaggctacaaggtcagcttcgagtccgccagcaagaaggaggtggacaagctggtggaggagggcaagctctacatgtttcagatctacaacaaggattttagcgacaagtcgcacggcacgccgaacctgcacacgatgtacttcaagctgctgttcgacgagaacaaccacggccagatccggctgtcgggcggtgcggagctgttcatgcgccgggcgtcgctcaagaaggaagagctggtcgtccacccggccaacagccccatcgccaacaagaaccccgacaaccccaagaaaacgacgacactcagctatgatgtctataaagacaagcgcttctcggaggaccagtacgagctgcacatccccatcgccatcaacaagtgccccaagaacatcttcaagatcaacacggaggtccgcgtgctcctcaagcacgacgacaacccgtacgtcatcggcatcgaccggggcgagcgcaacctgctgtacatcgtcgtcgtcgatggcaagggcaacatcgtggagcagtattccctgaacgagatcatcaacaacttcaacggcatccgcatcaagaccgactaccactccctcctcgacaagaaggagaaagagcgcttcgaggcccgccagaactggacctccatcgagaacatcaaggagcttaaggcgggctacatctcccaagtcgtccacaagatctgcgagctggtcgagaagtacgacgcggtgatcgccctggaagacctgaactccggcttcaagaactcccgcgtaaaggtggagaagcaagtgtaccagaagttcgagaagatgctgatcgacaagctgaactacatggtggacaagaaatcgaacccgtgcgcgaccggcggcgcgctcaagggctaccagatcacgaacaagttcgagtcgttcaagtccatgagcacgcagaacggctttatcttctacatcccggcctggctgacgtcgaagatcgacccctcgaccggcttcgtgaacctgctcaagaccaagtatactagcattgccgactccaagaaattcatctcgtccttcgaccgcatcatgtacgtcccggaggaggacctttttgagttcgccctcgactacaagaacttcagccgcaccgacgccgactacatcaagaagtggaagctgtactcgtacgggaaccgcatccgtatttttcgcaacccgaagaaaaataatgtcttcgactgggaggaggtgtgcctgaccagcgcctacaaggagctgttcaacaagtacggcatcaactaccaacagggcgacatccgggcccttctctgcgagcagagcgacaaggcgttctactcgtcgttcatggccctgatgagcctgatgctccagatgaggaacagcatcaccggccgcaccgacgtggacttcctcatcagccccgtcaagaactcggacggcatattttatgactcgcggaactacgaggcccaggagaacgccatcctgcccaagaacgccgacgccaacggcgcgtacaacatcgcccgcaaggtgctctgggccatcggccagttcaagaaggcggaagacgagaagctggacaaggtgaagatcgccatctccaacaaggagtggctggagtacgcgcagacgtccgtcaagcacggctccaagaaacggcggatcaaacaagattccggtggaagttccggaggttcaagcgggtctgaaacgccgggcaccagcgagtcggcgaccccggaaagcagcggtggttcttccggcggtagcatgcccgatcgagctcaagttatcattcgcattgtgccgggaggtggcaccaagacccttcaacaaattatcaatcagttggagtatctatcccggaagggcaggctggagctgcagcgttcagcccgacatctcgatattcccctgccaccggatcaaatccacgaacttgcccgaagctgggttcaagagactggaacttatgacgaaagtcagccagacgaggaaaggcaacaggagttgaccacccatattattgtaagcttccccgccggtacaagccaggtagcggcttatgcggcgagccgggagtgggcagccgagatgtttgggtcaggcgcaggggggggccgatacaactatcttacggccttccacatcgatcgcgaccacccacatctgcatgtcgtcgtcaatcggcgcgaacttttaggacacggctggctgaagatatctcggcgccatccccaactgaattacgacgccctgcgcataaagatggccgagatttcacttcgtcatggcattgccctcgatgcgagccgacgagcagaacgtggcatcaccgagcggccgatcacttatgcccaatatcggcgccttgagcgggagcaggctcgccaaatccgtttcgaagacgcggatttggaacagtcgtcgccgcaaggagatcatccagaattcagccaacctttcgatacatccccatttgaagcatccgcgggcggaccggaggacatgcctcggcccaacaatcggcagaatgagtcgcaagttcatctccaggagccagctggtgtcagcaacgaagccggtgtccttgtgcgggttgcattggaaacggagcgccttgctcaaccattcgtttccgaaaccattctcgcggacgacatagggagcggctcttcgcgtgttgccgagggccgtgtggagagcgcaaaccgcactcccgatattcctcgcgcagcaactgaagctgccacgcacacgacacacgaccggcagcggcgtgcaaagcgtcctcatgatgacgacggagggccgagtggagcaaaacgtgtgacattggaaggcatcgcggttgggccccaggcgaacgccggcgaacaggatggcagtagtggccccttagtacggcaagctggaacgtcacggccatctccaccgacggccacgacgcgggccagcaccgcaaccgattcattgtctgctacagcccacctccagcaacggagaggtgtcctttcaaagcgtccgcgtgaagatgatgatggagaaccgagtgaacgcaaacgcgagagagatgagcgcagcaaggacgggcgtgggggaaataggagatagtctagaccaggcatcaaataaaacgaaaggctcagtcgaaagactgggcctttcgttttatctgttgtttgtcggtgaacgctctctactagagtcacactggctcaccttcgggtgggcctttctgcgtttatagtacgatatcccaatggcgcgccgagcttggctcgagcatggtcatagctgtttcctgtgtgaaattgttatccgctcacaattccacacaacatacgagccggaagcataaagtgtaaagcctggggtgcctaatgagtgagctaactcacattaattgcgttgcgctcactgcccgctttccagtcgggaaacctgtcgtgccagctgcattaatgaatcggccaacgcgcggggagaggcggtttgcgtattgggcgctgttccgcttcctcgctcactgactcgctgcgctcggtcgttcggctgcggcgagcggtatcagctcactcaaaggcggtaatacggttatccacagaatcaggggataacgcaggaaagaacatgtgagcaaaaggccagcaaaaggccaggaaccgtaaaaaggccgcgttgctggcgtttttccataggctccgcccccctgacgagcatcacaaaaatcgacgctcaagtcagaggtggcgaaacccgacaggactataaagataccaggcgtttccccctggaagctccctcgtgcgctctcctgttccgaccctgccgcttaccggatacctgtccgcctttctcccttcgggaagcgtggcgctttctcatagctcacgctgtaggtatctcagttcggtgtaggtcgttcgctccaagctgggctgtgtgcacgaaccccccgttcagcccgaccgctgcgccttatccggtaactatcgtcttgagtccaacccggtaagacacgacttatcgccactggcagcagccactggtaacaggattagcagagcgaggtatgtaggcggtgctacagagttcttgaagtggtggcctaactacggctacactagaagaacagtatttggtatctgcgctctgctgaagccagttaccttcggaaaaagagttggtagctcttgatccggcaaacaaaccaccgctggtagcggtggtttttttgtttgcaagcagcagattacgcgcagaaaaaaaggatctcaagaagatcctttgatcttttctacggggtctgacgctcagtggaacgaaaactcacgttaagggattttggtcatgagattatcaaaaaggatcttcacctagatccttttaaattaaaaatgaagttttaaatcaatctaaagtatatatgagtaaacttggtctgacagttagaaaaactcatcgagcatcaaatgaaactgcaatttattcatatcaggattatcaataccatatttttgaaaaagccgtttctgtaatgaaggagaaaactcaccgaggcagttccataggatggcaagatcctggtatcggtctgcgattccgactcgtccaacatcaatacaacctattaatttcccctcgtcaaaaataaggttatcaagtgagaaatcaccatgagtgacgactgaatccggtgagaatggcaaaagtttatgcatttctttccagacttgttcaacaggccagccattacgctcgtcatcaaaatcactcgcatcaaccaaaccgttattcattcgtgattgcgcctgagcgaaacgaaatacgcgatcgctgttaaaaggacaattacaaacaggaatcgaatgcaaccggcgcaggaacactgccagcgcatcaacaatattttcacctgaatcaggatattcttctaatacctggaatgctgttttcccagggatcgcagtggtgagtaaccatgcatcatcaggagtacggataaaatgcttgatggtcggaagaggcataaattccgtcagccagtttagtctgaccatctcatctgtaacatcattggcaacgctacctttgccatgtttcagaaacaactctggcgcatcgggcttcccatacaatcgatagattgtcgcacctgattgcccgacattatcgcgagcccatttatacccatataaatcagcatccatgttggaatttaatcgcggcctagagcaagacgtttcccgttgaatatggctcatactcttcctttttcaatattattgaagcatttatcagggttattgtctcatgagcggatacatatttgaatgtatttagaaaaataaacaaataggggttccgcgcacatttccccgaaaagtgccacctgacgtctaagaaaccattattatcatgacattaacctataaaaataggcgtatcacgaggcccttttgtctcgcgcgtttcggtgatgacggtgaaaacctctgacacatgcagctcccggagactgtcacagcttgtctgtaagcggatgccgggagcagacaagcccgtcagggcgcgtcagcgggtgttggcgggtgtcggggctggcttaactatgcggcatcagagcagattgtactgagagtgcaccatatgcggtgtgaaataccgcacagatgcgtaaggagaaaataccgcatcaggcgccattcgccattcaggctgcgcaactgttgggaagggcgatcggtgcgggcctcttcgctattacgccagctggcgaaagggggatgtgctgcaaggcgattaagttgggtaacgccagggttttcccagtcacgacgttgtaaaacgacggccagtgaattgacgcgttgcggctgcatgaaatcctggccggtttgtctgatgccaagctggcggcctggccggccagcttggccgctgaagaaaccgagcgccgccgtctaaaaaggtgatgtgtatttgagtaaaacagcttgcgtcatgcggtcgctgcgtatatgatgcgatgagtaaataaacaaatacgcaaggggaacgcatgaaggttatcgctgtacttaaccagaaaggcgggtcaggcaagacgaccatcgcaacccatctagcccgcgccctgcaactcgccggggccgatgttctgttagtcgattccgatccccagggcagtgcccgcgattgggcggccgtgcgggaagatcaaccgctaaccgttgtcggcatcgaccgcccgacgattgaccgcgacgtgaaggccatcggccggcgcgacttcgtagtgatcgacggagcgccccaggcggcggacttggctgtgtccgcgatcaaggcagccgacttcgtgctgattccggtgcagccaagcccttacgacatatgggccaccgccgacctggtggagctggttaagcagcgcattgaggtcacggatggaaggctacaagcggcctttgtcgtgtcgcgggcgatcaaaggcacgcgcatcggcggtgaggttgccgaggcgctggccgggtacgagctgcccattcttgagtcccgtatcacgcagcgcgtgagctacccaggcactgccgccgccggcacaaccgttcttgaatcagaacccgagggcgacgctgcccgcgaggtccaggcgctggccgctgaaattaaatcaaaactcatttgagttaatgaggtaaagagaaaatgagcaaaagcacaaacacgctaagtgccggccgtccgagcgcacgcagcagcaaggctgcaacgttggccagcctggcagacacgccagccatgaagcgggtcaactttcagttgccggcggaggatcacaccaagctgaagatgtacgcggtacgccaaggcaagaccattaccgagctgctatctgaatacatcgcgcagctaccagagtaaatgagcaaatgaataaatgagtagatgaattttagcggctaaaggaggcggcatggaaaatcaagaacaaccaggcaccgacgccgtggaatgccccatgtgtggaggaacgggcggttggccaggcgtaagcggctgggttgtctgccggccctgcaatggcactggaacccccaagcccgaggaatcggcgtgagcggtcgcaaaccatccggcccggtacaaatcggcgcggcgctgggtgatgacctggtggagaagttgaaggccgcgcaggccgcccagcggcaacgcatcgaggcagaagcacgccccggtgaatcgtggcaagcggccgctgatcgaatccgcaaagaatcccggcaaccgccggcagccggtgcgccgtcgattaggaagccgcccaagggcgacgagcaaccagattttttcgttccgatgctctatgacgtgggcacccgcgatagtcgcagcatcatggacgtggccgttttccgtctgtcgaagcgtgaccgacgagctggcgaggtgatccgctacgagcttccagacgggcacgtagaggtttccgcagggccggccggcatggccagtgtgtgggattacgacctggtactgatggcggtttcccatctaaccgaatccatgaaccgataccgggaagggaagggagacaagcccggccgcgtgttccgtccacacgttgcggacgtactcaagttctgccggcgagccgatggcggaaagcagaaagacgacctggtagaaacctgcattcggttaaacaccacgcacgttgccatgcagcgtacgaagaaggccaagaacggccgcctggtgacggtatccgagggtgaagccttgattagccgctacaagatcgtaaagagcgaaaccgggcggccggagtacatcgagatcgagctagctgattggatgtaccgcgagatcacagaaggcaagaacccggacgtgctgacggttcaccccgattactttttgatcgatcccggcatcggccgttttctctaccgcctggcacgccgcgccgcaggcaaggcagaagccagatggttgttcaagacgatctacgaacgcagtggcagcgccggagagttcaagaagttctgtttcaccgtgcgcaagctgatcgggtcaaatgacctgccggagtacgatttgaaggaggaggcggggcaggctggcccgatcctagtcatgcgctaccgcaacctgatcgagggcgaagcatccgccggttcctaatgtacggagcagatgctagggcaaattgccctagcaggggaaaaaggtcgaaaaggtctctttcctgtggatagcacgtacattgggaacccaaagccgtacattgggaaccggaacccgtacattgggaacccaaagccgtacattgggaaccggtcacacatgtaagtgactgatataaaagagaaaaaaggcgatttttccgcctaaaactctttaaaacttattaaaactcttaaaacccgcctggcctgtgcatatgctagtcatgccccgcgcccaccggaaggagctgactgggttgaaggctctcaagggcatcggtcgagatcc

SEQ ID NO: 144 - DNA, 11481 bp, synthetic construct
  misc_feature 1..11481: note = pWISE3898 Full Plasmid Sequence
  source 1..11481: mol_type = other DNA
cggtgcctaatgagtgagctaacttacattaattgcgttgcgccccttaattaacaaaaaacccctcaagacccgtttagaggccccaaggggttatgctagttattgctcagcggaatctacacttagtagaaattacatggagggcacagttaagccgcatctacacttagtagaaattatttaatctttgaaacgctagcattatacctaggactgagctagctgtcaacaattggggatgagattatcaaaaaggatcttcacctagatccttttaaattaaaaatgaagttttaaatcaatctaaagtatatatgtgtaacattggtctagtgattggatccggagactcgaccagggtaatcagcacgtctgttcggcgcgcctatagctatggtttctcgcaatcgctttgggcagtcggttgtggcggtgcgtcttctgagacccgaaggttggcgattatctgctggaggtcttcgataccgtcttcgaagaacaagacatatgttcgctgagctcggacataggatagtcggcataggcggataccctcgccacgcaaatggcgcgatcgacaccctgatcggagcctgcgaagtgccacagtttattggaaccatcccccgttcattccgccctggaatttcacttcgacggcattctagatcctcgccgttgtcttagagagccatctttcgtcggcgcacccttaagtgcatggaaagccgttttcgcttcaaatgaaatcgaaaagaagaaaacaaaaatcctagagtaaccgaccctcccgataatcgtgaacatcagatgacagcatttcttccgaccgaagtggctgtgttggttatgagcttggggagatggggaggtaccatgagcggctccaagaagcgccgcatcaagcaagattcaaagctggagaagttcaccaactgctactcgctgagcaagacgctgcggttcaaggccatccccgtgggcaagacccaggagaacatcgacaacaagcgcctcctggtcgaggacgagaagcgcgccgaggactacaagggcgtcaagaagctcctggaccggtattacctcagcttcatcaacgacgtgctgcactcgatcaagctcaagaacctgaacaactacatcagcctgttccgcaagaaaacgcgcaccgagaaggagaacaaagagctggagaacctggagatcaacctgcggaaggagattgcgaaagctttcaagggcaacgagggctacaagtcgctcttcaagaaagacataatcgagaccatcctgccggagttcctggacgacaaggacgagatcgcgctcgtcaactcgttcaacgggttcactacggccttcacgggtttcttcgataaccgggagaatatgtttagcgaggaggccaagtccacctccattgcgttccgctgcatcaacgagaacctgacccgctacatcagcaacatggacatcttcgagaaggtggacgccatcttcgacaagcacgaggtccaggagatcaaggagaagattctgaactcggactacgacgtggaagacttcttcgagggcgagtttttcaacttcgtcctgacccaggaggggatcgacgtttataacgccatcatcggcgggttcgtcacggagtcgggcgaaaagatcaagggcctgaacgagtatattaacctgtacaaccagaagacaaagcagaagctgccgaagttcaagccgctgtacaagcaagtcctgtccgaccgcgagtcgctgtcgttctacggcgaaggctacacctcggacgaggaggtgctggaggtgttccgcaacaccctgaacaagaatagcgaaatttttagctccattaagaagctcgagaagctgttcaagaacttcgacgagtacagcagcgccgggatcttcgtcaagaacggccccgcgatcagcaccatctcgaaggacatcttcggcgagtggaacgtcatccgggacaagtggaacgccgagtacgacgacattcaccttaaaaagaaggctgttgtgacggagaagtacgaggacgaccggcgcaagtcgttcaaaaagatcggctccttctccctggagcagctccaggagtacgccgacgccgacctctcggtcgtcgagaagctcaaggagatcatcattcagaaggtggacgaaatttacaaagtgtacggctccagcgagaagctgttcgacgccgacttcgtgctggaaaagtcgctcaagaaaaacgacgccgtggtggccatcatgaaggacttgctggacagcgtgaagtcgttcgagaactacattaaggcgttctttggcgagggcaaggagaccaaccgcgacgagtcgttctacggcgacttcgtgctcgcgtacgacatcctgctcaaggtggatcacatctacgacgcgatccgcaactacgtcacgcagaagccgtactcgaaggacaagttcaagctgtacttccagaacccgcagttcatgggcgggtgggacaaggacaaggaaacggactaccgcgcgaccatcctgcggtacggcagcaagtattatctggcgatcatggacaaaaaatatgccaagtgcctccagaaaatcgacaaggacgacgtgaacggcaactacgagaagattaattacaagctgctccccggccccaacaagatgctcccgaaggtgttctttagcaagaagtggatggcctactacaacccgagcgaggacatccagaagatctataagaatggcaccttcaagaagggagacatgtttaacctcaacgactgccacaagctgattgacttcttcaaggactcgatctcgcgctacccgaagtggtcgaacgcctacgacttcaacttcagcgaaacggagaaatacaaagacatcgcgggcttctaccgcgaggtcgaggagcaaggctacaaggtcagcttcgagtccgccagcaagaaggaggtggacaagctggtggaggagggcaagctctacatgtttcagatctacaacaaggattttagcgacaagtcgcacggcacgccgaacctgcacacgatgtacttcaagctgctgttcgacgagaacaaccacggccagatccggctgtcgggcggtgcggagctgttcatgcgccgggcgtcgctcaagaaggaagagctggtcgtccacccggccaacagccccatcgccaacaagaaccccgacaaccccaagaaaacgacgacactcagctatgatgtctataaagacaagcgcttctcggaggaccagtacgagctgcacatccccatcgccatcaacaagtgccccaagaacatcttcaagatcaacacggaggtccgcgtgctcctcaagcacgacgacaacccgtacgtcatcggcatcgaccggggcgagcgcaacctgctgtacatcgtcgtcgtcgatggcaagggcaacatcgtggagcagtattccctgaacgagatcatcaacaacttcaacggcatccgcatcaagaccgactaccactccctcctcgacaagaaggagaaagagcgcttcgaggcccgccagaactggacctccatcgagaacatcaaggagcttaaggcgggctacatctcccaagtcgtccacaagatctgcgagctggtcgagaagtacgacgcggtgatcgccctggaagacctgaactccggcttcaagaactcccgcgtaaaggtggagaagcaagtgtaccagaagttcgagaagatgctgatcgacaagctgaactacatggtggacaagaaatcgaacccgtgcgcgaccggcggcgcgctcaagggctaccagatcacgaacaagttcgagtcgttcaagtccatgagcacgcagaacggctttatcttctacatcccggcctggctgacgtcgaagatcgacccctcgaccggcttcgtgaacctgctcaagaccaagtatactagcattgccgactccaagaaattcatctcgtccttcgaccgcatcatgtacgtcccggaggaggacctttttgagttcgccctcgactacaagaacttcagccgcaccgacgccgactacatcaagaagtggaagctgtactcgtacgggaaccgcatccgtatttttcgcaacccgaagaaaaataatgtcttcgactgggaggaggtgtgcctgaccagcgcctacaaggagctgttcaacaagtacggcatcaactaccaacagggcgacatccgggcccttctctgcgagcagagcgacaaggcgttctactcgtcgttcatggccctgatgagcctgatgctccagatgaggaacagcatcaccggccgcaccgacgtggacttcctcatcagccccgtcaagaactcggacggcatattttatgactcgcggaactacgaggcccaggagaacgccatcctgcccaagaacgccgacgccaacggcgcgtacaacatcgcccgcaaggtgctctgggccatcggccagttcaagaaggcggaagacgagaagctggacaaggtgaagatcgccatctccaacaaggagtggctggagtacgcgcagacgtccgtcaagcacggctccaagaaacggcggatcaaacaagattccggtggaagttccggaggttcaagcgggtctgaaacgccgggcaccagcgagtcggcgaccccggaaagcagcggtggttcttccggcggtagcatgcccgatcgagctcaagttatcattcgcattgtgccgggaggtggcaccaagacccttcaacaaattatcaatcagttggagtatctatcccggaagggcaggctggagctgcagcgttcagcccgacatctcgatattcccctgccaccggatcaaatccacgaacttgcccgaagctgggttcaagagactggaacttatgacgaaagtcagccagacgaggaaaggcaacaggagttgaccacccatattattgtaagcttccccgccggtacaagccaggtagcggcttatgcggcgagccgggagtgggcagccgagatgtttgggtcaggcgcaggggggggccgatacaactatcttacggccttccacatcgatcgcgaccacccacatctgcatgtcgtcgtcaatcggcgcgaacttttaggacacggctggctgaagatatctcggcgccatccccaactgaattacgacgccctgcgcataaagatggccgagatttcacttcgtcatggcattgccctcgatgcgagccgacgagcagaacgtggcatcaccgagcggccgatcacttatgcccaatatcggcgccttgagcgggagcaggctcgccaaatccgtttcgaagacgcggatttggaacagtcgtcgccgcaaggagatcatccagaattcagccaacctttcgatacatccccatttgaagcatccgcgggcggaccggaggacatgcctcggcccaacaatcggcagaatgagtcgcaagttcatctccaggagccagctggtgtcagcaacgaagccggtgtccttgtgcgggttgcattggaaacggagcgccttgctcaaccattcgtttccgaaaccattctcgcggacgacatagggagcggctcttcgcgtgttgccgagggccgtgtggagagcgcaaaccgcactcccgatattcctcgcgcagcaactgaagctgccacgcacacgacacacgaccggcagcggcgtgcaaagcgtcctcatgatgacgacggagggccgagtggagcaaaacgtgtgacattggaaggcatcgcggttgggccccaggcgaacgccggcgaacaggatggcagtagtggccccttagtacggcaagctggaacgtcacggccatctccaccgacggccacgacgcgggccagcaccgcaaccgattcattgtctgctacagcccacctccagcaacggagaggtgtcctttcaaagcgtccgcgtgaagatgatgatggagaaccgagtgaacgcaaacgcgagagagatgagcgcagcaaggacgggcgtgggggaaataggagatagtctagaccaggcatcaaataaaacgaaaggctcagtcgaaagactgggcctttcgttttatctgttgtttgtcggtgaacgctctctactagagtcacactggctcaccttcgggtgggcctttctgcgtttatagtacgatatcccaatggcgcgccgagcttggctcgagcatggtcatagctgtttcctgtgtgaaattgttatccgctcacaattccacacaacatacgagccggaagcataaagtgtaaagcctggggtgcctaatgagtgagctaactcacattaattgcgttgcgctcactgcccgctttccagtcgggaaacctgtcgtgccagctgcattaatgaatcggccaacgcgcggggagaggcggtttgcgtattgggcgctgttccgcttcctcgctcactgactcgctgcgctcggtcgttcggctgcggcgagcggtatcagctcactcaaaggcggtaatacggttatccacagaatcaggggataacgcaggaaagaacatgtgagcaaaaggccagcaaaaggccaggaaccgtaaaaaggccgcgttgctggcgtttttccataggctccgcccccctgacgagcatcacaaaaatcgacgctcaagtcagaggtggcgaaacccgacaggactataaagataccaggcgtttccccctggaagctccctcgtgcgctctcctgttccgaccctgccgcttaccggatacctgtccgcctttctcccttcgggaagcgtggcgctttctcatagctcacgctgtaggtatctcagttcggtgtaggtcgttcgctccaagctgggctgtgtgcacgaaccccccgttcagcccgaccgctgcgccttatccggtaactatcgtcttgagtccaacccggtaagacacgacttatcgccactggcagcagccactggtaacaggattagcagagcgaggtatgtaggcggtgctacagagttcttgaagtggtggcctaactacggctacactagaagaacagtatttggtatctgcgctctgctgaagccagttaccttcggaaaaagagttggtagctcttgatccggcaaacaaaccaccgctggtagcggtggtttttttgtttgcaagcagcagattacgcgcagaaaaaaaggatctcaagaagatcctttgatcttttctacggggtctgacgctcagtggaacgaaaactcacgttaagggattttggtcatgagattatcaaaaaggatcttcacctagatccttttaaattaaaaatgaagttttaaatcaatctaaagtatatatgagtaaacttggtctgacagttagaaaaactcatcgagcatcaaatgaaactgcaatttattcatatcaggattatcaataccatatttttgaaaaagccgtttctgtaatgaaggagaaaactcaccgaggcagttccataggatggcaagatcctggtatcggtctgcgattccgactcgtccaacatcaatacaacctattaatttcccctcgtcaaaaataaggttatcaagtgagaaatcaccatgagtgacgactgaatccggtgagaatggcaaaagtttatgcatttctttccagacttgttcaacaggccagccattacgctcgtcatcaaaatcactcgcatcaaccaaaccgttattcattcgtgattgcgcctgagcgaaacgaaatacgcgatcgctgttaaaaggacaattacaaacaggaatcgaatgcaaccggcgcaggaacactgccagcgcatcaacaatattttcacctgaatcaggatattcttctaatacctggaatgctgttttcccagggatcgcagtggtgagtaaccatgcatcatcaggagtacggataaaatgcttgatggtcggaagaggcataaattccgtcagccagtttagtctgaccatctcatctgtaacatcattggcaacgctacctttgccatgtttcagaaacaactctggcgcatcgggcttcccatacaatcgatagattgtcgcacctgattgcccgacattatcgcgagcccatttatacccatataaatcagcatccatgttggaatttaatcgcggcctagagcaagacgtttcccgttgaatatggctcatactcttcctttttcaatattattgaagcatttatcagggttattgtctcatgagcggatacatatttgaatgtatttagaaaaataaacaaataggggttccgcgcacatttccccgaaaagtgccacctgacgtctaagaaaccattattatcatgacattaacctataaaaataggcgtatcacgaggcccttttgtctcgcgcgtttcggtgatgacggtgaaaacctctgacacatgcagctcccggagactgtcacagcttgtctgtaagcggatgccgggagcagacaagcccgtcagggcgcgtcagcgggtgttggcgggtgtcggggctggcttaactatgcggcatcagagcagattgtactgagagtgcaccatatgcggtgtgaaataccgcacagatgcgtaaggagaaaataccgcatcaggcgccattcgccattcaggctgcgcaactgttgggaagggcgatcggtgcgggcctcttcgctattacgccagctggcgaaagggggatgtgctgcaaggcgattaagttgggtaacgccagggttttcccagtcacgacgttgtaaaacgacggccagtgaattgacgcgttgcggctgcatgaaatcctggccggtttgtctgatgccaagctggcggcctggccggccagcttggccgctgaagaaaccgagcgccgccgtctaaaaaggtgatgtgtatttgagtaaaacagcttgcgtcatgcggtcgctgcgtatatgatgcgatgagtaaataaacaaatacgcaaggggaacgcatgaaggttatcgctgtacttaaccagaaaggcgggtcaggcaagacgaccatcgcaacccatctagcccgcgccctgcaactcgccggggccgatgttctgttagtcgattccgatccccagggcagtgcccgcgattgggcggccgtgcgggaagatcaaccgctaaccgttgtcggcatcgaccgcccgacgattgaccgcgacgtgaaggccatcggccggcgcgacttcgtagtgatcgacggagcgccccaggcggcggacttggctgtgtccgcgatcaaggcagccgacttcgtgctgattccggtgcagccaagcccttacgacatatgggccaccgccgacctggtggagctggttaagcagcgcattgaggtcacggatggaaggctacaagcggcctttgtcgtgtcgcgggcgatcaaaggcacgcgcatcggcggtgaggttgccgaggcgctggccgggtacgagctgcccattcttgagtcccgtatcacgcagcgcgtgagctacccaggcactgccgccgccggcacaaccgttcttgaatcagaacccgagggcgacgctgcccgcgaggtccaggcgctggccgctgaaattaaatcaaaactcatttgagttaatgaggtaaagagaaaatgagcaaaagcacaaacacgctaagtgccggccgtccgagcgcacgcagcagcaaggctgcaacgttggccagcctggcagacacgccagccatgaagcgggtcaactttcagttgccggcggaggatcacaccaagctgaagatgtacgcggtacgccaaggcaagaccattaccgagctgctatctgaatacatcgcgcagctaccagagtaaatgagcaaatgaataaatgagtagatgaattttagcggctaaaggaggcggcatggaaaatcaagaacaaccaggcaccgacgccgtggaatgccccatgtgtggaggaacgggcggttggccaggcgtaagcggctgggttgtctgccggccctgcaatggcactggaacccccaagcccgaggaatcggcgtgagcggtcgcaaaccatccggcccggtacaaatcggcgcggcgctgggtgatgacctggtggagaagttgaaggccgcgcaggccgcccagcggcaacgcatcgaggcagaagcacgccccggtgaatcgtggcaagcggccgctgatcgaatccgcaaagaatcccggcaaccgccggcagccggtgcgccgtcgattaggaagccgcccaagggcgacgagcaaccagattttttcgttccgatgctctatgacgtgggcacccgcgatagtcgcagcatcatggacgtggccgttttccgtctgtcgaagcgtgaccgacgagctggcgaggtgatccgctacgagcttccagacgggcacgtagaggtttccgcagggccggccggcatggccagtgtgtgggattacgacctggtactgatggcggtttcccatctaaccgaatccatgaaccgataccgggaagggaagggagacaagcccggccgcgtgttccgtccacacgttgcggacgtactcaagttctgccggcgagccgatggcggaaagcagaaagacgacctggtagaaacctgcattcggttaaacaccacgcacgttgccatgcagcgtacgaagaaggccaagaacggccgcctggtgacggtatccgagggtgaagccttgattagccgctacaagatcgtaaagagcgaaaccgggcggccggagtacatcgagatcgagctagctgattggatgtaccgcgagatcacagaaggcaagaacccggacgtgctgacggttcaccccgattactttttgatcgatcccggcatcggccgttttctctaccgcctggcacgccgcgccgcaggcaaggcagaagccagatggttgttcaagacgatctacgaacgcagtggcagcgccggagagttcaagaagttctgtttcaccgtgcgcaagctgatcgggtcaaatgacctgccggagtacgatttgaaggaggaggcggggcaggctggcccgatcctagtcatgcgctaccgcaacctgatcgagggcgaagcatccgccggttcctaatgtacggagcagatgctagggcaaattgccctagcaggggaaaaaggtcgaaaaggtctctttcctgtggatagcacgtacattgggaacccaaagccgtacattgggaaccggaacccgtacattgggaacccaaagccgtacattgggaaccggtcacacatgtaagtgactgatataaaagagaaaaaaggcgatttttccgcctaaaactctttaaaacttattaaaactcttaaaacccgcctggcctgtgcatatgctagtcatgccccgcgcccaccggaaggagctgactgggttgaaggctctcaagggcatcggtcgagatcc

SEQ ID NO: 145 - DNA, 12796 bp, synthetic construct
  misc_feature 1..12796: note = pWISE3901 Full Plasmid Sequence
  source 1..12796: mol_type = other DNA
cggtgcctaatgagtgagctaacttacattaattgcgttgcgccccgagagcgttcaccgacaaacaacagataaaacgaaaggcccagtctttcgactgagcctttcgttttatttgatgcctggttacctcgaaagcccgctgcgcgagcggtcacgcgatgaggcatccagctccgctcgggtgcggttatagacctcattgatatttttctcgaaggattcgtttgtcgtcagaaggcccactgcgttagggccgcctctggcgaggctggccgaagagccaccactgctgccgcccgaatcctgtttgatccgacgcttcttgctaccagcagaataaatgccggagttcgcggcaatagcggacgggatcggatttccatccttgaggaggccctgcatcgccttgacgatcaattcgcagtcggagttcgttgcgaatatcgggatggtgagttccatgttcaggtagctgcgccaggccgccaccggcagttcaacgccgcccacggtctgcgtcgcaactttgggaacctcgaccttgatggtgtacttccgcttctgggccgatgactggcggacggagcaggtcactttatacgcttgggaccgcgagttgctggagatccattccgccactccattggcaaaattcgagggggctacggtgacatcacccgtaccgccgttgtcgaccaggacgaattgagtgaaattgctggcgtcctgcttgatgcggcgcttcttggacccgctcatggtacctccccatctccccaagctcataaccaacacagccacttcggtcggaagaaatgctgtcatctgatgttcacgattatcgggagggtcggttactctaggatttttgttttcttcttttcgatttcatttgaagcgaaaacggctttccatgcacttaagggtgcgccgacgaaagatggctctctaagacaacggcgaggatctagaatgccgtcgaagtgaaattccagggcggaatgaacgggggatggttccaataaactgtggcacttcgcaggctccgatcagggtgtcgatcgcgccatttgcgtggcgagggtatccgcctatgccgactatcctatgtccgagctcagcgaacatatgtcttgttcttcgaagacggtatcgaagacctccagcagataatcgccaaccttcgggtctcagaagacgcaccgccacaaccgactgcccaaagcgattgcgagaaaccatagctataggcgcgccgaacagacgtgctgattaccctggtcgagtctccttaattaacaaaaaacccctcaagacccgtttagaggccccaaggggttatgctagttattgctcagcggaatctacacttagtagaaattagggaacacgagcgacatgggtgatcctcatgtcgctcgtggcacatgggtgatcctcatgtgctccctatccacatgtgtttttagtaaaatctacacttagtagaaattatttaatctttgaaacgctagcattatacctaggactgagctagctgtcaacaattggggatgagattatcaaaaaggatcttcacctagatccttttaaattaaaaatgaagttttaaatcaatctaaagtatatatgtgtaacattggtctagtgattggatccggagactcgaccagggtaatcagcacgtctgttcggcgcgcctatagctatggtttctcgcaatcgctttgggcagtcggttgtggcggtgcgtcttctgagacccgaaggttggcgattatctgctggaggtcttcgataccgtcttcgaagaacaagacatatgttcgctgagctcggacataggatagtcggcataggcggataccctcgccacgcaaatggcgcgatcgacaccctgatcggagcctgcgaagtgccacagtttattggaaccatcccccgttcattccgccctggaatttcacttcgacggcattctagatcctcgccgttgtcttagagagccatctttcgtcggcgcacccttaagtgcatggaaagccgttttcgcttcaaatgaaatcgaaaagaagaaaacaaaaatcctagagtaaccgaccctcccgataatcgtgaacatcagatgacagcatttcttccgaccgaagtggctgtgttggttatgagcttggggagatggggaggtaccatgagcggctccaagaagcgccgcatcaagcaagattcaaagctggagaagttcaccaactgctactcgctgagcaagacgctgcggttcaaggccatccccgtgggcaagacccaggagaacatcgacaacaagcgcctcctggtcgaggacgagaagcgcgccgaggactacaagggcgtcaagaagctcctggaccggtattacctcagcttcatcaacgacgtgctgcactcgatcaagctcaagaacctgaacaactacatcagcctgttccgcaagaaaacgcgcaccgagaaggagaacaaagagctggagaacctggagatcaacctgcggaaggagattgcgaaagctttcaagggcaacgagggctacaagtcgctcttcaagaaagacataatcgagaccatcctgccggagttcctggacgacaaggacgagatcgcgctcgtcaactcgttcaacgggttcactacggccttcacgggtttcttcgataaccgggagaatatgtttagcgaggaggccaagtccacctccattgcgttccgctgcatcaacgagaacctgacccgctacatcagcaacatggacatcttcgagaaggtggacgccatcttcgacaagcacgaggtccaggagatcaaggagaagattctgaactcggactacgacgtggaagacttcttcgagggcgagtttttcaacttcgtcctgacccaggaggggatcgacgtttataacgccatcatcggcgggttcgtcacggagtcgggcgaaaagatcaagggcctgaacgagtatattaacctgtacaaccagaagacaaagcagaagctgccgaagttcaagccgctgtacaagcaagtcctgtccgaccgcgagtcgctgtcgttctacggcgaaggctacacctcggacgaggaggtgctggaggtgttccgcaacaccctgaacaagaatagcgaaatttttagctccattaagaagctcgagaagctgttcaagaacttcgacgagtacagcagcgccgggatcttcgtcaagaacggccccgcgatcagcaccatctcgaaggacatcttcggcgagtggaacgtcatccgggacaagtggaacgccgagtacgacgacattcaccttaaaaagaaggctgttgtgacggagaagtacgaggacgaccggcgcaagtcgttcaaaaagatcggctccttctccctggagcagctccaggagtacgccgacgccgacctctcggtcgtcgagaagctcaaggagatcatcattcagaaggtggacgaaatttacaaagtgtacggctccagcgagaagctgttcgacgccgacttcgtgctggaaaagtcgctcaagaaaaacgacgccgtggtggccatcatgaaggacttgctggacagcgtgaagtcgttcgagaactacattaaggcgttctttggcgagggcaaggagaccaaccgcgacgagtcgttctacggcgacttcgtgctcgcgtacgacatcctgctcaaggtggatcacatctacgacgcgatccgcaactacgtcacgcagaagccgtactcgaaggacaagttcaagctgtacttccagaacccgcagttcatgggcgggtgggacaaggacaaggaaacggactaccgcgcgaccatcctgcggtacggcagcaagtattatctggcgatcatggacaaaaaatatgccaagtgcctccagaaaatcgacaaggacgacgtgaacggcaactacgagaagattaattacaagctgctccccggccccaacaagatgctcccgaaggtgttctttagcaagaagtggatggcctactacaacccgagcgaggacatccagaagatctataagaatggcaccttcaagaagggagacatgtttaacctcaacgactgccacaagctgattgacttcttcaaggactcgatctcgcgctacccgaagtggtcgaacgcctacgacttcaacttcagcgaaacggagaaatacaaagacatcgcgggcttctaccgcgaggtcgaggagcaaggctacaaggtcagcttcgagtccgccagcaagaaggaggtggacaagctggtggaggagggcaagctctacatgtttcagatctacaacaaggattttagcgacaagtcgcacggcacgccgaacctgcacacgatgtacttcaagctgctgttcgacgagaacaaccacggccagatccggctgtcgggcggtgcggagctgttcatgcgccgggcgtcgctcaagaaggaagagctggtcgtccacccggccaacagccccatcgccaacaagaaccccgacaaccccaagaaaacgacgacactcagctatgatgtctataaagacaagcgcttctcggaggaccagtacgagctgcacatccccatcgccatcaacaagtgccccaagaacatcttcaagatcaacacggaggtccgcgtgctcctcaagcacgacgacaacccgtacgtcatcggcatcgaccggggcgagcgcaacctgctgtacatcgtcgtcgtcgatggcaagggcaacatcgtggagcagtattccctgaacgagatcatcaacaacttcaacggcatccgcatcaagaccgactaccactccctcctcgacaagaaggagaaagagcgcttcgaggcccgccagaactggacctccatcgagaacatcaaggagcttaaggcgggctacatctcccaagtcgtccacaagatctgcgagctggtcgagaagtacgacgcggtgatcgccctggaagacctgaactccggcttcaagaactcccgcgtaaaggtggagaagcaagtgtaccagaagttcgagaagatgctgatcgacaagctgaactacatggtggacaagaaatcgaacccgtgcgcgaccggcggcgcgctcaagggctaccagatcacgaacaagttcgagtcgttcaagtccatgagcacgcagaacggctttatcttctacatcccggcctggctgacgtcgaagatcgacccctcgaccggcttcgtgaacctgctcaagaccaagtatactagcattgccgactccaagaaattcatctcgtccttcgaccgcatcatgtacgtcccggaggaggacctttttgagttcgccctcgactacaagaacttcagccgcaccgacgccgactacatcaagaagtggaagctgtactcgtacgggaaccgcatccgtatttttcgcaacccgaagaaaaataatgtcttcgactgggaggaggtgtgcctgaccagcgcctacaaggagctgttcaacaagtacggcatcaactaccaacagggcgacatccgggcccttctctgcgagcagagcgacaaggcgttctactcgtcgttcatggccctgatgagcctgatgctccagatgaggaacagcatcaccggccgcaccgacgtggacttcctcatcagccccgtcaagaactcggacggcatattttatgactcgcggaactacgaggcccaggagaacgccatcctgcccaagaacgccgacgccaacggcgcgtacaacatcgcccgcaaggtgctctgggccatcggccagttcaagaaggcggaagacgagaagctggacaaggtgaagatcgccatctccaacaaggagtggctggagtacgcgcagacgtccgtcaagcacggctccaagaaacggcggatcaaacaagattccggtggaagttccggaggttcaagcgggtctgaaacgccgggcaccagcgagtcggcgaccccggaaagcagcggtggttcttccggcggtagcatgcccgatcgagctcaagttatcattcgcattgtgccgggaggtggcaccaagacccttcaacaaattatcaatcagttggagtatctatcccggaagggcaggctggagctgcagcgttcagcccgacatctcgatattcccctgccaccggatcaaatccacgaacttgcccgaagctgggttcaagagactggaacttatgacgaaagtcagccagacgaggaaaggcaacaggagttgaccacccatattattgtaagcttccccgccggtacaagccaggtagcggcttatgcggcgagccgggagtgggcagccgagatgtttgggtcaggcgcaggggggggccgatacaactatcttacggccttccacatcgatcgcgaccacccacatctgcatgtcgtcgtcaatcggcgcgaacttttaggacacggctggctgaagatatctcggcgccatccccaactgaattacgacgccctgcgcataaagatggccgagatttcacttcgtcatggcattgccctcgatgcgagccgacgagcagaacgtggcatcaccgagcggccgatcacttatgcccaatatcggcgccttgagcgggagcaggctcgccaaatccgtttcgaagacgcggatttggaacagtcgtcgccgcaaggagatcatccagaattcagccaacctttcgatacatccccatttgaagcatccgcgggcggaccggaggacatgcctcggcccaacaatcggcagaatgagtcgcaagttcatctccaggagccagctggtgtcagcaacgaagccggtgtccttgtgcgggttgcattggaaacggagcgccttgctcaaccattcgtttccgaaaccattctcgcggacgacatagggagcggctcttcgcgtgttgccgagggccgtgtggagagcgcaaaccgcactcccgatattcctcgcgcagcaactgaagctgccacgcacacgacacacgaccggcagcggcgtgcaaagcgtcctcatgatgacgacggagggccgagtggagcaaaacgtgtgacattggaaggcatcgcggttgggccccaggcgaacgccggcgaacaggatggcagtagtggccccttagtacggcaagctggaacgtcacggccatctccaccgacggccacgacgcgggccagcaccgcaaccgattcattgtctgctacagcccacctccagcaacggagaggtgtcctttcaaagcgtccgcgtgaagatgatgatggagaaccgagtgaacgcaaacgcgagagagatgagcgcagcaaggacgggcgtgggggaaataggagatagtctagaccaggcatcaaataaaacgaaaggctcagtcgaaagactgggcctttcgttttatctgttgtttgtcggtgaacgctctctactagagtcacactggctcaccttcgggtgggcctttctgcgtttatagtacgatatcccaatggcgcgccgagcttggctcgagcatggtcatagctgtttcctgtgtgaaattgttatccgctcacaattccacacaacatacgagccggaagcataaagtgtaaagcctggggtgcctaatgagtgagctaactcacattaattgcgttgcgctcactgcccgctttccagtcgggaaacctgtcgtgccagctgcattaatgaatcggccaacgcgcggggagaggcggtttgcgtattgggcgctgttccgcttcctcgctcactgactcgctgcgctcggtcgttcggctgcggcgagcggtatcagctcactcaaaggcggtaatacggttatccacagaatcaggggataacgcaggaaagaacatgtgagcaaaaggccagcaaaaggccaggaaccgtaaaaaggccgcgttgctggcgtttttccataggctccgcccccctgacgagcatcacaaaaatcgacgctcaagtcagaggtggcgaaacccgacaggactataaagataccaggcgtttccccctggaagctccctcgtgcgctctcctgttccgaccctgccgcttaccggatacctgtccgcctttctcccttcgggaagcgtggcgctttctcatagctcacgctgtaggtatctcagttcggtgtaggtcgttcgctccaagctgggctgtgtgcacgaaccccccgttcagcccgaccgctgcgccttatccggtaactatcgtcttgagtccaacccggtaagacacgacttatcgccactggcagcagccactggtaacaggattagcagagcgaggtatgtaggcggtgctacagagttcttgaagtggtggcctaactacggctacactagaagaacagtatttggtatctgcgctctgctgaagccagttaccttcggaaaaagagttggtagctcttgatccggcaaacaaaccaccgctggtagcggtggtttttttgtttgcaagcagcagattacgcgcagaaaaaaaggatctcaagaagatcctttgatcttttctacggggtctgacgctcagtggaacgaaaactcacgttaagggattttggtcatgagattatcaaaaaggatcttcacctagatccttttaaattaaaaatgaagttttaaatcaatctaaagtatatatgagtaaacttggtctgacagttagaaaaactcatcgagcatcaaatgaaactgcaatttattcatatcaggattatcaataccatatttttgaaaaagccgtttctgtaatgaaggagaaaactcaccgaggcagttccataggatggcaagatcctggtatcggtctgcgattccgactcgtccaacatcaatacaacctattaatttcccctcgtcaaaaataaggttatcaagtgagaaatcaccatgagtgacgactgaatccggtgagaatggcaaaagtttatgcatttctttccagacttgttcaacaggccagccattacgctcgtcatcaaaatcactcgcatcaaccaaaccgttattcattcgtgattgcgcctgagcgaaacgaaatacgcgatcgctgttaaaaggacaattacaaacaggaatcgaatgcaaccggcgcaggaacactgccagcgcatcaacaatattttcacctgaatcaggatattcttctaatacctggaatgctgttttcccagggatcgcagtggtgagtaaccatgcatcatcaggagtacggataaaatgcttgatggtcggaagaggcataaattccgtcagccagtttagtctgaccatctcatctgtaacatcattggcaacgctacctttgccatgtttcagaaacaactctggcgcatcgggcttcccatacaatcgatagattgtcgcacctgattgcccgacattatcgcgagcccatttatacccatataaatcagcatccatgttggaatttaatcgcggcctagagcaagacgtttcccgttgaatatggctcatactcttcctttttcaatattattgaagcatttatcagggttattgtctcatgagcggatacatatttgaatgtatttagaaaaataaacaaataggggttccgcgcacatttccccgaaaagtgccacctgacgtctaagaaaccattattatcatgacattaacctataaaaataggcgtatcacgaggcccttttgtctcgcgcgtttcggtgatgacggtgaaaacctctgacacatgcagctcccggagactgtcacagcttgtctgtaagcggatgccgggagcagacaagcccgtcagggcgcgtcagcgggtgttggcgggtgtcggggctggcttaactatgcggcatcagagcagattgtactgagagtgcaccatatgcggtgtgaaataccgcacagatgcgtaaggagaaaataccgcatcaggcgccattcgccattcaggctgcgcaactgttgggaagggcgatcggtgcgggcctcttcgctattacgccagctggcgaaagggggatgtgctgcaaggcgattaagttgggtaacgccagggttttcccagtcacgacgttgtaaaacgacggccagtgaattgacgcgttgcggctgcatgaaatcctggccggtttgtctgatgccaagctggcggcctggccggccagcttggccgctgaagaaaccgagcgccgccgtctaaaaaggtgatgtgtatttgagtaaaacagcttgcgtcatgcggtcgctgcgtatatgatgcgatgagtaaataaacaaatacgcaaggggaacgcatgaaggttatcgctgtacttaaccagaaaggcgggtcaggcaagacgaccatcgcaacccatctagcccgcgccctgcaactcgccggggccgatgttctgttagtcgattccgatccccagggcagtgcccgcgattgggcggccgtgcgggaagatcaaccgctaaccgttgtcggcatcgaccgcccgacgattgaccgcgacgtgaaggccatcggccggcgcgacttcgtagtgatcgacggagcgccccaggcggcggacttggctgtgtccgcgatcaaggcagccgacttcgtgctgattccggtgcagccaagcccttacgacatatgggccaccgccgacctggtggagctggttaagcagcgcattgaggtcacggatggaaggctacaagcggcctttgtcgtgtcgcgggcgatcaaaggcacgcgcatcggcggtgaggttgccgaggcgctggccgggtacgagctgcccattcttgagtcccgtatcacgcagcgcgtgagctacccaggcactgccgccgccggcacaaccgttcttgaatcagaacccgagggcgacgctgcccgcgaggtccaggcgctggccgctgaaattaaatcaaaactcatttgagttaatgaggtaaagagaaaatgagcaaaagcacaaacacgctaagtgccggccgtccgagcgcacgcagcagcaaggctgcaacgttggccagcctggcagacacgccagccatgaagcgggtcaactttcagttgccggcggaggatcacaccaagctgaagatgtacgcggtacgccaaggcaagaccattaccgagctgctatctgaatacatcgcgcagctaccagagtaaatgagcaaatgaataaatgagtagatgaattttagcggctaaaggaggcggcatggaaaatcaagaacaaccaggcaccgacgccgtggaatgccccatgtgtggaggaacgggcggttggccaggcgtaagcggctgggttgtctgccggccctgcaatggcactggaacccccaagcccgaggaatcggcgtgagcggtcgcaaaccatccggcccggtacaaatcggcgcggcgctgggtgatgacctggtggagaagttgaaggccgcgcaggccgcccagcggcaacgcatcgaggcagaagcacgccccggtgaatcgtggcaagcggccgctgatcgaatccgcaaagaatcccggcaaccgccggcagccggtgcgccgtcgattaggaagccgcccaagggcgacgagcaaccagattttttcgttccgatgctctatgacgtgggcacccgcgatagtcgcagcatcatggacgtggccgttttccgtctgtcgaagcgtgaccgacgagctggcgaggtgatccgctacgagcttccagacgggcacgtagaggtttccgcagggccggccggcatggccagtgtgtgggattacgacctggtactgatggcggtttcccatctaaccgaatccatgaaccgataccgggaagggaagggagacaagcccggccgcgtgttccgtccacacgttgcggacgtactcaagttctgccggcgagccgatggcggaaagcagaaagacgacctggtagaaacctgcattcggttaaacaccacgcacgttgccatgcagcgtacgaagaaggccaagaacggccgcctggtgacggtatccgagggtgaagccttgattagccgctacaagatcgtaaagagcgaaaccgggcggccggagtacatcgagatcgagctagctgattggatgtaccgcgagatcacagaaggcaagaacccggacgtgctgacggttcaccccgattactttttgatcgatcccggcatcggccgttttctctaccgcctggcacgccgcgccgcaggcaaggcagaagccagatggttgttcaagacgatctacgaacgcagtggcagcgccggagagttcaagaagttctgtttcaccgtgcgcaagctgatcgggtcaaatgacctgccggagtacgatttgaaggaggaggcggggcaggctggcccgatcctagtcatgcgctaccgcaacctgatcgagggcgaagcatccgccggttcctaatgtacggagcagatgctagggcaaattgccctagcaggggaaaaaggtcgaaaaggtctctttcctgtggatagcacgtacattgggaacccaaagccgtacattgggaaccggaacccgtacattgggaacccaaagccgtacattgggaaccggtcacacatgtaagtgactgatataaaagagaaaaaaggcgatttttccgcctaaaactctttaaaacttattaaaactcttaaaacccgcctggcctgtgcatatgctagtcatgccccgcgcccaccggaaggagctgactgggttgaaggctctcaagggcatcggtcgagatcc

SEQ ID NO: 146 - DNA, 12796 bp, synthetic construct
  misc_feature 1..12796: note = pWISE3902 Full Plasmid Sequence
  source 1..12796: mol_type = other DNA
cggtgcctaatgagtgagctaacttacattaattgcgttgcgccccgagagcgttcaccgacaaacaacagataaaacgaaaggcccagtctttcgactgagcctttcgttttatttgatgcctggttacctcgaaagcccgctgcgcgagcggtcacgcgatgaggcatccagctccgctcgggtgcggttatagacctcattgatatttttctcgaaggattcgtttgtcgtcagaaggcccactgcgttagggccgcctctggcgaggctggccgaagagccaccactgctgccgcccgaatcctgtttgatccgacgcttcttgctaccagcagaataaatgccggagttcgcggcaatagcggacgggatcggatttccatccttgaggaggccctgcatcgccttgacgatcaattcgcagtcggagttcgttgcgaatatcgggatggtgagttccatgttcaggtagctgcgccaggccgccaccggcagttcaacgccgcccacggtctgcgtcgcaactttgggaacctcgaccttgatggtgtacttccgcttctgggccgatgactggcggacggagcaggtcactttatacgcttgggaccgcgagttgctggagatccattccgccactccattggcaaaattcgagggggctacggtgacatcacccgtaccgccgttgtcgaccaggacgaattgagtgaaattgctggcgtcctgcttgatgcggcgcttcttggacccgctcatggtacctccccatctccccaagctcataaccaacacagccacttcggtcggaagaaatgctgtcatctgatgttcacgattatcgggagggtcggttactctaggatttttgttttcttcttttcgatttcatttgaagcgaaaacggctttccatgcacttaagggtgcgccgacgaaagatggctctctaagacaacggcgaggatctagaatgccgtcgaagtgaaattccagggcggaatgaacgggggatggttccaataaactgtggcacttcgcaggctccgatcagggtgtcgatcgcgccatttgcgtggcgagggtatccgcctatgccgactatcctatgtccgagctcagcgaacatatgtcttgttcttcgaagacggtatcgaagacctccagcagataatcgccaaccttcgggtctcagaagacgcaccgccacaaccgactgcccaaagcgattgcgagaaaccatagctataggcgcgccgaacagacgtgctgattaccctggtcgagtctccttaattaacaaaaaacccctcaagacccgtttagaggccccaaggggttatgctagttattgctcagcggaatctacacttagtagaaattagggaacacgagcgacatgggtgatcctcatgtcgctcgtggcacatgggtgatcctcatgtgctccccatggagggcacagttaagccgcatctacacttagtagaaattatttaatctttgaaacgctagcattatacctaggactgagctagctgtcaacaattggggatgagattatcaaaaaggatcttcacctagatccttttaaattaaaaatgaagttttaaatcaatctaaagtatatatgtgtaacattggtctagtgattggatccggagactcgaccagggtaatcagcacgtctgttcggcgcgcctatagctatggtttctcgcaatcgctttgggcagtcggttgtggcggtgcgtcttctgagacccgaaggttggcgattatctgctggaggtcttcgataccgtcttcgaagaacaagacatatgttcgctgagctcggacataggatagtcggcataggcggataccctcgccacgcaaatggcgcgatcgacaccctgatcggagcctgcgaagtgccacagtttattggaaccatcccccgttcattccgccctggaatttcacttcgacggcattctagatcctcgccgttgtcttagagagccatctttcgtcggcgcacccttaagtgcatggaaagccgttttcgcttcaaatgaaatcgaaaagaagaaaacaaaaatcctagagtaaccgaccctcccgataatcgtgaacatcagatgacagcatttcttccgaccgaagtggctgtgttggttatgagcttggggagatggggaggtaccatgagcggctccaagaagcgccgcatcaagcaagattcaaagctggagaagttcaccaactgctactcgctgagcaagacgctgcggttcaaggccatccccgtgggcaagacccaggagaacatcgacaacaagcgcctcctggtcgaggacgagaagcgcgccgaggactacaagggcgtcaagaagctcctggaccggtattacctcagcttcatcaacgacgtgctgcactcgatcaagctcaagaacctgaacaactacatcagcctgttccgcaagaaaacgcgcaccgagaaggagaacaaagagctggagaacctggagatcaacctgcggaaggagattgcgaaagctttcaagggcaacgagggctacaagtcgctcttcaagaaagacataatcgagaccatcctgccggagttcctggacgacaaggacgagatcgcgctcgtcaactcgttcaacgggttcactacggccttcacgggtttcttcgataaccgggagaatatgtttagcgaggaggccaagtccacctccattgcgttccgctgcatcaacgagaacctgacccgctacatcagcaacatggacatcttcgagaaggtggacgccatcttcgacaagcacgaggtccaggagatcaaggagaagattctgaactcggactacgacgtggaagacttcttcgagggcgagtttttcaacttcgtcctgacccaggaggggatcgacgtttataacgccatcatcggcgggttcgtcacggagtcgggcgaaaagatcaagggcctgaacgagtatattaacctgtacaaccagaagacaaagcagaagctgccgaagttcaagccgctgtacaagcaagtcctgtccgaccgcgagtcgctgtcgttctacggcgaaggctacacctcggacgaggaggtgctggaggtgttccgcaacaccctgaacaagaatagcgaaatttttagctccattaagaagctcgagaagctgttcaagaacttcgacgagtacagcagcgccgggatcttcgtcaagaacggccccgcgatcagcaccatctcgaaggacatcttcggcgagtggaacgtcatccgggacaagtggaacgccgagtacgacgacattcaccttaaaaagaaggctgttgtgacggagaagtacgaggacgaccggcgcaagtcgttcaaaaagatcggctccttctccctggagcagctccaggagtacgccgacgccgacctctcggtcgtcgagaagctcaaggagatcatcattcagaaggtggacgaaatttacaaagtgtacggctccagcgagaagctgttcgacgccgacttcgtgctggaaaagtcgctcaagaaaaacgacgccgtggtggccatcatgaaggacttgctggacagcgtgaagtcgttcgagaactacattaaggcgttctttggcgagggcaaggagaccaaccgcgacgagtcgttctacggcgacttcgtgctcgcgtacgacatcctgctcaaggtggatcacatctacgacgcgatccgcaactacgtcacgcagaagccgtactcgaaggacaagttcaagctgtacttccagaacccgcagttcatgggcgggtgggacaaggacaaggaaacggactaccgcgcgaccatcctgcggtacggcagcaagtattatctggcgatcatggacaaaaaatatgccaagtgcctccagaaaatcgacaaggacgacgtgaacggcaactacgagaagattaattacaagctgctccccggccccaacaagatgctcccgaaggtgttctttagcaagaagtggatggcctactacaacccgagcgaggacatccagaagatctataagaatggcaccttcaagaagggagacatgtttaacctcaacgactgccacaagctgattgacttcttcaaggactcgatctcgcgctacccgaagtggtcgaacgcctacgacttcaacttcagcgaaacggagaaatacaaagacatcgcgggcttctaccgcgaggtcgaggagcaaggctacaaggtcagcttcgagtccgccagcaagaaggaggtggacaagctggtggaggagggcaagctctacatgtttcagatctacaacaaggattttagcgacaagtcgcacggcacgccgaacctgcacacgatgtacttcaagctgctgttcgacgagaacaaccacggccagatccggctgtcgggcggtgcggagctgttcatgcgccgggcgtcgctcaagaaggaagagctggtcgtccacccggccaacagccccatcgccaacaagaaccccgacaaccccaagaaaacgacgacactcagctatgatgtctataaagacaagcgcttctcggaggaccagtacgagctgcacatccccatcgccatcaacaagtgccccaagaacatcttcaagatcaacacggaggtccgcgtgctcctcaagcacgacgacaacccgtacgtcatcggcatcgaccggggcgagcgcaacctgctgtacatcgtcgtcgtcgatggcaagggcaacatcgtggagcagtattccctgaacgagatcatcaacaacttcaacggcatccgcatcaagaccgactaccactccctcctcgacaagaaggagaaagagcgcttcgaggcccgccagaactggacctccatcgagaacatcaaggagcttaaggcgggctacatctcccaagtcgtccacaagatctgcgagctggtcgagaagtacgacgcggtgatcgccctggaagacctgaactccggcttcaagaactcccgcgtaaaggtggagaagcaagtgtaccagaagttcgagaagatgctgatcgacaagctgaactacatggtggacaagaaatcgaacccgtgcgcgaccggcggcgcgctcaagggctaccagatcacgaacaagttcgagtcgttcaagtccatgagcacgcagaacggctttatcttctacatcccggcctggctgacgtcgaagatcgacccctcgaccggcttcgtgaacctgctcaagaccaagtatactagcattgccgactccaagaaattcatctcgtccttcgaccgcatcatgtacgtcccggaggaggacctttttgagttcgccctcgactacaagaacttcagccgcaccgacgccgactacatcaagaagtggaagctgtactcgtacgggaaccgcatccgtatttttcgcaacccgaagaaaaataatgtcttcgactgggaggaggtgtgcctgaccagcgcctacaaggagctgttcaacaagtacggcatcaactaccaacagggcgacatccgggcccttctctgcgagcagagcgacaaggcgttctactcgtcgttcatggccctgatgagcctgatgctccagatgaggaacagcatcaccggccgcaccgacgtggacttcctcatcagccccgtcaagaactcggacggcatattttatgactcgcggaactacgaggcccaggagaacgccatcctgcccaagaacgccgacgccaacggcgcgtacaacatcgcccgcaaggtgctctgggccatcggccagttcaagaaggcggaagacgagaagctggacaaggtgaagatcgccatctccaacaaggagtggctggagtacgcgcagacgtccgtcaagcacggctccaagaaacggcggatcaaacaagattccggtggaagttccggaggttcaagcgggtctgaaacgccgggcaccagcgagtcggcgaccccggaaagcagcggtggttcttccggcggtagcatgcccgatcgagctcaagttatcattcgcattgtgccgggaggtggcaccaagacccttcaacaaattatcaatcagttggagtatctatcccggaagggcaggctggagctgcagcgttcagcccgacatctcgatattcccctgccaccggatcaaatccacgaacttgcccgaagctgggttcaagagactggaacttatgacgaaagtcagccagacgaggaaaggcaacaggagttgaccacccatattattgtaagcttccccgccggtacaagccaggtagcggcttatgcggcgagccgggagtgggcagccgagatgtttgggtcaggcgcaggggggggccgatacaactatcttacggccttccacatcgatcgcgaccacccacatctgcatgtcgtcgtcaatcggcgcgaacttttaggacacggctggctgaagatatctcggcgccatccccaactgaattacgacgccctgcgcataaagatggccgagatttcacttcgtcatggcattgccctcgatgcgagccgacgagcagaacgtggcatcaccgagcggccgatcacttatgcccaatatcggcgccttgagcgggagcaggctcgccaaatccgtttcgaagacgcggatttggaacagtcgtcgccgcaaggagatcatccagaattcagccaacctttcgatacatccccatttgaagcatccgcgggcggaccggaggacatgcctcggcccaacaatcggcagaatgagtcgcaagttcatctccaggagccagctggtgtcagcaacgaagccggtgtccttgtgcgggttgcattggaaacggagcgccttgctcaaccattcgtttccgaaaccattctcgcggacgacatagggagcggctcttcgcgtgttgccgagggccgtgtggagagcgcaaaccgcactcccgatattcctcgcgcagcaactgaagctgccacgcacacgacacacgaccggcagcggcgtgcaaagcgtcctcatgatgacgacggagggccgagtggagcaaaacgtgtgacattggaaggcatcgcggttgggccccaggcgaacgccggcgaacaggatggcagtagtggccccttagtacggcaagctggaacgtcacggccatctccaccgacggccacgacgcgggccagcaccgcaaccgattcattgtctgctacagcccacctccagcaacggagaggtgtcctttcaaagcgtccgcgtgaagatgatgatggagaaccgagtgaacgcaaacgcgagagagatgagcgcagcaaggacgggcgtgggggaaataggagatagtctagaccaggcatcaaataaaacgaaaggctcagtcgaaagactgggcctttcgttttatctgttgtttgtcggtgaacgctctctactagagtcacactggctcaccttcgggtgggcctttctgcgtttatagtacgatatcccaatggcgcgccgagcttggctcgagcatggtcatagctgtttcctgtgtgaaattgttatccgctcacaattccacacaacatacgagccggaagcataaagtgtaaagcctggggtgcctaatgagtgagctaactcacattaattgcgttgcgctcactgcccgctttccagtcgggaaacctgtcgtgccagctgcattaatgaatcggccaacgcgcggggagaggcggtttgcgtattgggcgctgttccgcttcctcgctcactgactcgctgcgctcggtcgttcggctgcggcgagcggtatcagctcactcaaaggcggtaatacggttatccacagaatcaggggataacgcaggaaagaacatgtgagcaaaaggccagcaaaaggccaggaaccgtaaaaaggccgcgttgctggcgtttttccataggctccgcccccctgacgagcatcacaaaaatcgacgctcaagtcagaggtggcgaaacccgacaggactataaagataccaggcgtttccccctggaagctccctcgtgcgctctcctgttccgaccctgccgcttaccggatacctgtccgcctttctcccttcgggaagcgtggcgctttctcatagctcacgctgtaggtatctcagttcggtgtaggtcgttcgctccaagctgggctgtgtgcacgaaccccccgttcagcccgaccgctgcgccttatccggtaactatcgtcttgagtccaacccggtaagacacgacttatcgccactggcagcagccactggtaacaggattagcagagcgaggtatgtaggcggtgctacagagttcttgaagtggtggcctaactacggctacactagaagaacagtatttggtatctgcgctctgctgaagccagttaccttcggaaaaagagttggtagctcttgatccggcaaacaaaccaccgctggtagcggtggtttttttgtttgcaagcagcagattacgcgcagaaaaaaaggatctcaagaagatcctttgatcttttctacggggtctgacgctcagtggaacgaaaactcacgttaagggattttggtcatgagattatcaaaaaggatcttcacctagatccttttaaattaaaaatgaagttttaaatcaatctaaagtatatatgagtaaacttggtctgacagttagaaaaactcatcgagcatcaaatgaaactgcaatttattcatatcaggattatcaataccatatttttgaaaaagccgtttctgtaatgaaggagaaaactcaccgaggcagttccataggatggcaagatcctggtatcggtctgcgattccgactcgtccaacatcaatacaacctattaatttcccctcgtcaaaaataaggttatcaagtgagaaatcaccatgagtgacgactgaatccggtgagaatggcaaaagtttatgcatttctttccagacttgttcaacaggccagccattacgctcgtcatcaaaatcactcgcatcaaccaaaccgttattcattcgtgattgcgcctgagcgaaacgaaatacgcgatcgctgttaaaaggacaattacaaacaggaatcgaatgcaaccggcgcaggaacactgccagcgcatcaacaatattttcacctgaatcaggatattcttctaatacctggaatgctgttttcccagggatcgcagtggtgagtaaccatgcatcatcaggagtacggataaaatgcttgatggtcggaagaggcataaattccgtcagccagtttagtctgaccatctcatctgtaacatcattggcaacgctacctttgccatgtttcagaaacaactctggcgcatcgggcttcccatacaatcgatagattgtcgcacctgattgcccgacattatcgcgagcccatttatacccatataaatcagcatccatgttggaatttaatcgcggcctagagcaagacgtttcccgttgaatatggctcatactcttcctttttcaatattattgaagcatttatcagggttattgtctcatgagcggatacatatttgaatgtatttagaaaaataaacaaataggggttccgcgcacatttccccgaaaagtgccacctgacgtctaagaaaccattattatcatgacattaacctataaaaataggcgtatcacgaggcccttttgtctcgcgcgtttcggtgatgacggtgaaaacctctgacacatgcagctcccggagactgtcacagcttgtctgtaagcggatgccgggagcagacaagcccgtcagggcgcgtcagcgggtgttggcgggtgtcggggctggcttaactatgcggcatcagagcagattgtactgagagtgcaccatatgcggtgtgaaataccgcacagatgcgtaaggagaaaataccgcatcaggcgccattcgccattcaggctgcgcaactgttgggaagggcgatcggtgcgggcctcttcgctattacgccagctggcgaaagggggatgtgctgcaaggcgattaagttgggtaacgccagggttttcccagtcacgacgttgtaaaacgacggccagtgaattgacgcgttgcggctgcatgaaatcctggccggtttgtctgatgccaagctggcggcctggccggccagcttggccgctgaagaaaccgagcgccgccgtctaaaaaggtgatgtgtatttgagtaaaacagcttgcgtcatgcggtcgctgcgtatatgatgcgatgagtaaataaacaaatacgcaaggggaacgcatgaaggttatcgctgtacttaaccagaaaggcgggtcaggcaagacgaccatcgcaacccatctagcccgcgccctgcaactcgccggggccgatgttctgttagtcgattccgatccccagggcagtgcccgcgattgggcggccgtgcgggaagatcaaccgctaaccgttgtcggcatcgaccgcccgacgattgaccgcgacgtgaaggccatcggccggcgcgacttcgtagtgatcgacggagcgccccaggcggcggacttggctgtgtccgcgatcaaggcagccgacttcgtgctgattccggtgcagccaagcccttacgacatatgggccaccgccgacctggtggagctggttaagcagcgcattgaggtcacggatggaaggctacaagcggcctttgtcgtgtcgcgggcgatcaaaggcacgcgcatcggcggtgaggttgccgaggcgctggccgggtacgagctgcccattcttgagtcccgtatcacgcagcgcgtgagctacccaggcactgccgccgccggcacaaccgttcttgaatcagaacccgagggcgacgctgcccgcgaggtccaggcgctggccgctgaaattaaatcaaaactcatttgagttaatgaggtaaagagaaaatgagcaaaagcacaaacacgctaagtgccggccgtccgagcgcacgcagcagcaaggctgcaacgttggccagcctggcagacacgccagccatgaagcgggtcaactttcagttgccggcggaggatcacaccaagctgaagatgtacgcggtacgccaaggcaagaccattaccgagctgctatctgaatacatcgcgcagctaccagagtaaatgagcaaatgaataaatgagtagatgaattttagcggctaaaggaggcggcatggaaaatcaagaacaaccaggcaccgacgccgtggaatgccccatgtgtggaggaacgggcggttggccaggcgtaagcggctgggttgtctgccggccctgcaatggcactggaacccccaagcccgaggaatcggcgtgagcggtcgcaaaccatccggcccggtacaaatcggcgcggcgctgggtgatgacctggtggagaagttgaaggccgcgcaggccgcccagcggcaacgcatcgaggcagaagcacgccccggtgaatcgtggcaagcggccgctgatcgaatccgcaaagaatcccggcaaccgccggcagccggtgcgccgtcgattaggaagccgcccaagggcgacgagcaaccagattttttcgttccgatgctctatgacgtgggcacccgcgatagtcgcagcatcatggacgtggccgttttccgtctgtcgaagcgtgaccgacgagctggcgaggtgatccgctacgagcttccagacgggcacgtagaggtttccgcagggccggccggcatggccagtgtgtgggattacgacctggtactgatggcggtttcccatctaaccgaatccatgaaccgataccgggaagggaagggagacaagcccggccgcgtgttccgtccacacgttgcggacgtactcaagttctgccggcgagccgatggcggaaagcagaaagacgacctggtagaaacctgcattcggttaaacaccacgcacgttgccatgcagcgtacgaagaaggccaagaacggccgcctggtgacggtatccgagggtgaagccttgattagccgctacaagatcgtaaagagcgaaaccgggcggccggagtacatcgagatcgagctagctgattggatgtaccgcgagatcacagaaggcaagaacccggacgtgctgacggttcaccccgattactttttgatcgatcccggcatcggccgttttctctaccgcctggcacgccgcgccgcaggcaaggcagaagccagatggttgttcaagacgatctacgaacgcagtggcagcgccggagagttcaagaagttctgtttcaccgtgcgcaagctgatcgggtcaaatgacctgccggagtacgatttgaaggaggaggcggggcaggctggcccgatcctagtcatgcgctaccgcaacctgatcgagggcgaagcatccgccggttcctaatgtacggagcagatgctagggcaaattgccctagcaggggaaaaaggtcgaaaaggtctctttcctgtggatagcacgtacattgggaacccaaagccgtacattgggaaccggaacccgtacattgggaacccaaagccgtacattgggaaccggtcacacatgtaagtgactgatataaaagagaaaaaaggcgatttttccgcctaaaactctttaaaacttattaaaactcttaaaacccgcctggcctgtgcatatgctagtcatgccccgcgcccaccggaaggagctgactgggttgaaggctctcaagggcatcggtcgagatcc

SEQ ID NO: 147 - DNA, 11110 bp, synthetic construct
  misc_feature 1..11110: note = pWISE3905 Full Plasmid Sequence
  source 1..11110: mol_type = other DNA
gcccaccggaaggagctgactgggttgaaggctctcaagggcatcggtcgagatcccggtgcctaatgagtgagctaacttacattaattgcgttgcgccccttaattaacaaaaaacccctcaagacccgtttagaggccccaaggggttatgctagttattgctcagcggaatctacacttagtagaaattatatccacatgtgtttttagtaaaatctacacttagtagaaattatttaatctttgaaacgctagcattatacctaggactgagctagctgtcaacaattggggatgagattatcaaaaaggatcttcacctagatccttttaaattaaaaatgaagttttaaatcaatctaaagtatatatgtgtaacattggtctagtgattggatccttgacagctagctcagtcctaggtactgtgctagcgctagcaaagaggagaaaggtaccatgcccgatcgagctcaagttatcattcgcattgtgccgggaggtggcaccaagacccttcaacaaattatcaatcagttggagtatctatcccggaagggcaggctggagctgcagcgttcagcccgacatctcgatattcccctgccaccggatcaaatccacgaacttgcccgaagctgggttcaagagactggaacttatgacgaaagtcagccagacgaggaaaggcaacaggagttgaccacccatattattgtaagcttccccgccggtacaagccaggtagcggcttatgcggcgagccgggagtgggcagccgagatgtttgggtcaggcgcaggggggggccgatacaactatcttacggccttccacatcgatcgcgaccacccacatctgcatgtcgtcgtcaatcggcgcgaacttttaggacacggctggctgaagatatctcggcgccatccccaactgaattacgacgccctgcgcataaagatggccgagatttcacttcgtcatggcattgccctcgatgcgagccgacgagcagaacgtggcatcaccgagcggccgatcacttatgcccaatatcggcgccttgagcgggagcaggctcgccaaatccgtttcgaagacgcggatttggaacagtcgtcgccgcaaggagatcatccagaattcagccaacctttcgatacatccccatttgaagcatccgcgggcggaccggaggacatgcctcggcccaacaatcggcagaatgagtcgcaagttcatctccaggagccagctggtgtcagcaacgaagccggtgtccttgtgcgggttgcattggaaacggagcgccttgctcaaccattcgtttccgaaaccattctcgcggacgacatagggagcggctcttcgcgtgttgccgagggccgtgtggagagcgcaaaccgcactcccgatattcctcgcgcagcaactgaagctgccacgcacacgacacacgaccggcagcggcgtgcaaagcgtcctcatgatgacgacggagggccgagtggagcaaaacgtgtgacattggaaggcatcgcggttgggccccaggcgaacgccggcgaacaggatggcagtagtggccccttagtacggcaagctggaacgtcacggccatctccaccgacggccacgacgcgggccagcaccgcaaccgattcattgtctgctacagcccacctccagcaacggagaggtgtcctttcaaagcgtccgcgtgaagatgatgatggagaaccgagtgaacgcaaacgcgagagagatgagcgcagcaaggacgggcgtgggggaaataggagaagcggtggctcctcgggtggcagcatgagcggctccaagaagcgccgcatcaagcaagattcaaagctggagaagttcaccaactgctactcgctgagcaagacgctgcggttcaaggccatccccgtgggcaagacccaggagaacatcgacaacaagcgcctcctggtcgaggacgagaagcgcgccgaggactacaagggcgtcaagaagctcctggaccggtattacctcagcttcatcaacgacgtgctgcactcgatcaagctcaagaacctgaacaactacatcagcctgttccgcaagaaaacgcgcaccgagaaggagaacaaagagctggagaacctggagatcaacctgcggaaggagattgcgaaagctttcaagggcaacgagggctacaagtcgctcttcaagaaagacataatcgagaccatcctgccggagttcctggacgacaaggacgagatcgcgctcgtcaactcgttcaacgggttcactacggccttcacgggtttcttcgataaccgggagaatatgtttagcgaggaggccaagtccacctccattgcgttccgctgcatcaacgagaacctgacccgctacatcagcaacatggacatcttcgagaaggtggacgccatcttcgacaagcacgaggtccaggagatcaaggagaagattctgaactcggactacgacgtggaagacttcttcgagggcgagtttttcaacttcgtcctgacccaggaggggatcgacgtttataacgccatcatcggcgggttcgtcacggagtcgggcgaaaagatcaagggcctgaacgagtatattaacctgtacaaccagaagacaaagcagaagctgccgaagttcaagccgctgtacaagcaagtcctgtccgaccgcgagtcgctgtcgttctacggcgaaggctacacctcggacgaggaggtgctggaggtgttccgcaacaccctgaacaagaatagcgaaatttttagctccattaagaagctcgagaagctgttcaagaacttcgacgagtacagcagcgccgggatcttcgtcaagaacggccccgcgatcagcaccatctcgaaggacatcttcggcgagtggaacgtcatccgggacaagtggaacgccgagtacgacgacattcaccttaaaaagaaggctgttgtgacggagaagtacgaggacgaccggcgcaagtcgttcaaaaagatcggctccttctccctggagcagctccaggagtacgccgacgccgacctctcggtcgtcgagaagctcaaggagatcatcattcagaaggtggacgaaatttacaaagtgtacggctccagcgagaagctgttcgacgccgacttcgtgctggaaaagtcgctcaagaaaaacgacgccgtggtggccatcatgaaggacttgctggacagcgtgaagtcgttcgagaactacattaaggcgttctttggcgagggcaaggagaccaaccgcgacgagtcgttctacggcgacttcgtgctcgcgtacgacatcctgctcaaggtggatcacatctacgacgcgatccgcaactacgtcacgcagaagccgtactcgaaggacaagttcaagctgtacttccagaacccgcagttcatgggcgggtgggacaaggacaaggaaacggactaccgcgcgaccatcctgcggtacggcagcaagtattatctggcgatcatggacaaaaaatatgccaagtgcctccagaaaatcgacaaggacgacgtgaacggcaactacgagaagattaattacaagctgctccccggccccaacaagatgctcccgaaggtgttctttagcaagaagtggatggcctactacaacccgagcgaggacatccagaagatctataagaatggcaccttcaagaagggagacatgtttaacctcaacgactgccacaagctgattgacttcttcaaggactcgatctcgcgctacccgaagtggtcgaacgcctacgacttcaacttcagcgaaacggagaaatacaaagacatcgcgggcttctaccgcgaggtcgaggagcaaggctacaaggtcagcttcgagtccgccagcaagaaggaggtggacaagctggtggaggagggcaagctctacatgtttcagatctacaacaaggattttagcgacaagtcgcacggcacgccgaacctgcacacgatgtacttcaagctgctgttcgacgagaacaaccacggccagatccggctgtcgggcggtgcggagctgttcatgcgccgggcgtcgctcaagaaggaagagctggtcgtccacccggccaacagccccatcgccaacaagaaccccgacaaccccaagaaaacgacgacactcagctatgatgtctataaagacaagcgcttctcggaggaccagtacgagctgcacatccccatcgccatcaacaagtgccccaagaacatcttcaagatcaacacggaggtccgcgtgctcctcaagcacgacgacaacccgtacgtcatcggcatcgaccggggcgagcgcaacctgctgtacatcgtcgtcgtcgatggcaagggcaacatcgtggagcagtattccctgaacgagatcatcaacaacttcaacggcatccgcatcaagaccgactaccactccctcctcgacaagaaggagaaagagcgcttcgaggcccgccagaactggacctccatcgagaacatcaaggagcttaaggcgggctacatctcccaagtcgtccacaagatctgcgagctggtcgagaagtacgacgcggtgatcgccctggaagacctgaactccggcttcaagaactcccgcgtaaaggtggagaagcaagtgtaccagaagttcgagaagatgctgatcgacaagctgaactacatggtggacaagaaatcgaacccgtgcgcgaccggcggcgcgctcaagggctaccagatcacgaacaagttcgagtcgttcaagtccatgagcacgcagaacggctttatcttctacatcccggcctggctgacgtcgaagatcgacccctcgaccggcttcgtgaacctgctcaagaccaagtatactagcattgccgactccaagaaattcatctcgtccttcgaccgcatcatgtacgtcccggaggaggacctttttgagttcgccctcgactacaagaacttcagccgcaccgacgccgactacatcaagaagtggaagctgtactcgtacgggaaccgcatccgtatttttcgcaacccgaagaaaaataatgtcttcgactgggaggaggtgtgcctgaccagcgcctacaaggagctgttcaacaagtacggcatcaactaccaacagggcgacatccgggcccttctctgcgagcagagcgacaaggcgttctactcgtcgttcatggccctgatgagcctgatgctccagatgaggaacagcatcaccggccgcaccgacgtggacttcctcatcagccccgtcaagaactcggacggcatattttatgactcgcggaactacgaggcccaggagaacgccatcctgcccaagaacgccgacgccaacggcgcgtacaacatcgcccgcaaggtgctctgggccatcggccagttcaagaaggcggaagacgagaagctggacaaggtgaagatcgccatctccaacaaggagtggctggagtacgcgcagacgtccgtcaagcacggctccaagaaacggcggatcaaacaagattccggtggcagttccggtggcagcagtgcgtcgttagcaagaggcggtccaaatgcagtgggactcctaacgacgaacgaaagctttgagaaaaatatcaatgaggtctacaaccgtacgcgagccgagctagacgcttcttcacgtgacagaagtcgctctggactatcgcgataatctagaccaggcatcaaataaaacgaaaggctcagtcgaaagactgggcctttcgttttatctgttgtttgtcggtgaacgctctctactagagtcacactggctcaccttcgggtgggcctttctgcgtttatagtacgatatcccaatggcgcgccgagcttggctcgagcatggtcatagctgtttcctgtgtgaaattgttatccgctcacaattccacacaacatacgagccggaagcataaagtgtaaagcctggggtgcctaatgagtgagctaactcacattaattgcgttgcgctcactgcccgctttccagtcgggaaacctgtcgtgccagctgcattaatgaatcggccaacgcgcggggagaggcggtttgcgtattgggcgctgttccgcttcctcgctcactgactcgctgcgctcggtcgttcggctgcggcgagcggtatcagctcactcaaaggcggtaatacggttatccacagaatcaggggataacgcaggaaagaacatgtgagcaaaaggccagcaaaaggccaggaaccgtaaaaaggccgcgttgctggcgtttttccataggctccgcccccctgacgagcatcacaaaaatcgacgctcaagtcagaggtggcgaaacccgacaggactataaagataccaggcgtttccccctggaagctccctcgtgcgctctcctgttccgaccctgccgcttaccggatacctgtccgcctttctcccttcgggaagcgtggcgctttctcatagctcacgctgtaggtatctcagttcggtgtaggtcgttcgctccaagctgggctgtgtgcacgaaccccccgttcagcccgaccgctgcgccttatccggtaactatcgtcttgagtccaacccggtaagacacgacttatcgccactggcagcagccactggtaacaggattagcagagcgaggtatgtaggcggtgctacagagttcttgaagtggtggcctaactacggctacactagaagaacagtatttggtatctgcgctctgctgaagccagttaccttcggaaaaagagttggtagctcttgatccggcaaacaaaccaccgctggtagcggtggtttttttgtttgcaagcagcagattacgcgcagaaaaaaaggatctcaagaagatcctttgatcttttctacggggtctgacgctcagtggaacgaaaactcacgttaagggattttggtcatgagattatcaaaaaggatcttcacctagatccttttaaattaaaaatgaagttttaaatcaatctaaagtatatatgagtaaacttggtctgacagttagaaaaactcatcgagcatcaaatgaaactgcaatttattcatatcaggattatcaataccatatttttgaaaaagccgtttctgtaatgaaggagaaaactcaccgaggcagttccataggatggcaagatcctggtatcggtctgcgattccgactcgtccaacatcaatacaacctattaatttcccctcgtcaaaaataaggttatcaagtgagaaatcaccatgagtgacgactgaatccggtgagaatggcaaaagtttatgcatttctttccagacttgttcaacaggccagccattacgctcgtcatcaaaatcactcgcatcaaccaaaccgttattcattcgtgattgcgcctgagcgaaacgaaatacgcgatcgctgttaaaaggacaattacaaacaggaatcgaatgcaaccggcgcaggaacactgccagcgcatcaacaatattttcacctgaatcaggatattcttctaatacctggaatgctgttttcccagggatcgcagtggtgagtaaccatgcatcatcaggagtacggataaaatgcttgatggtcggaagaggcataaattccgtcagccagtttagtctgaccatctcatctgtaacatcattggcaacgctacctttgccatgtttcagaaacaactctggcgcatcgggcttcccatacaatcgatagattgtcgcacctgattgcccgacattatcgcgagcccatttatacccatataaatcagcatccatgttggaatttaatcgcggcctagagcaagacgtttcccgttgaatatggctcatactcttcctttttcaatattattgaagcatttatcagggttattgtctcatgagcggatacatatttgaatgtatttagaaaaataaacaaataggggttccgcgcacatttccccgaaaagtgccacctgacgtctaagaaaccattattatcatgacattaacctataaaaataggcgtatcacgaggcccttttgtctcgcgcgtttcggtgatgacggtgaaaacctctgacacatgcagctcccggagactgtcacagcttgtctgtaagcggatgccgggagcagacaagcccgtcagggcgcgtcagcgggtgttggcgggtgtcggggctggcttaactatgcggcatcagagcagattgtactgagagtgcaccatatgcggtgtgaaataccgcacagatgcgtaaggagaaaataccgcatcaggcgccattcgccattcaggctgcgcaactgttgggaagggcgatcggtgcgggcctcttcgctattacgccagctggcgaaagggggatgtgctgcaaggcgattaagttgggtaacgccagggttttcccagtcacgacgttgtaaaacgacggccagtgaattgacgcgttgcggctgcatgaaatcctggccggtttgtctgatgccaagctggcggcctggccggccagcttggccgctgaagaaaccgagcgccgccgtctaaaaaggtgatgtgtatttgagtaaaacagcttgcgtcatgcggtcgctgcgtatatgatgcgatgagtaaataaacaaatacgcaaggggaacgcatgaaggttatcgctgtacttaaccagaaaggcgggtcaggcaagacgaccatcgcaacccatctagcccgcgccctgcaactcgccggggccgatgttctgttagtcgattccgatccccagggcagtgcccgcgattgggcggccgtgcgggaagatcaaccgctaaccgttgtcggcatcgaccgcccgacgattgaccgcgacgtgaaggccatcggccggcgcgacttcgtagtgatcgacggagcgccccaggcggcggacttggctgtgtccgcgatcaaggcagccgacttcgtgctgattccggtgcagccaagcccttacgacatatgggccaccgccgacctggtggagctggttaagcagcgcattgaggtcacggatggaaggctacaagcggcctttgtcgtgtcgcgggcgatcaaaggcacgcgcatcggcggtgaggttgccgaggcgctggccgggtacgagctgcccattcttgagtcccgtatcacgcagcgcgtgagctacccaggcactgccgccgccggcacaaccgttcttgaatcagaacccgagggcgacgctgcccgcgaggtccaggcgctggccgctgaaattaaatcaaaactcatttgagttaatgaggtaaagagaaaatgagcaaaagcacaaacacgctaagtgccggccgtccgagcgcacgcagcagcaaggctgcaacgttggccagcctggcagacacgccagccatgaagcgggtcaactttcagttgccggcggaggatcacaccaagctgaagatgtacgcggtacgccaaggcaagaccattaccgagctgctatctgaatacatcgcgcagctaccagagtaaatgagcaaatgaataaatgagtagatgaattttagcggctaaaggaggcggcatggaaaatcaagaacaaccaggcaccgacgccgtggaatgccccatgtgtggaggaacgggcggttggccaggcgtaagcggctgggttgtctgccggccctgcaatggcactggaacccccaagcccgaggaatcggcgtgagcggtcgcaaaccatccggcccggtacaaatcggcgcggcgctgggtgatgacctggtggagaagttgaaggccgcgcaggccgcccagcggcaacgcatcgaggcagaagcacgccccggtgaatcgtggcaagcggccgctgatcgaatccgcaaagaatcccggcaaccgccggcagccggtgcgccgtcgattaggaagccgcccaagggcgacgagcaaccagattttttcgttccgatgctctatgacgtgggcacccgcgatagtcgcagcatcatggacgtggccgttttccgtctgtcgaagcgtgaccgacgagctggcgaggtgatccgctacgagcttccagacgggcacgtagaggtttccgcagggccggccggcatggccagtgtgtgggattacgacctggtactgatggcggtttcccatctaaccgaatccatgaaccgataccgggaagggaagggagacaagcccggccgcgtgttccgtccacacgttgcggacgtactcaagttctgccggcgagccgatggcggaaagcagaaagacgacctggtagaaacctgcattcggttaaacaccacgcacgttgccatgcagcgtacgaagaaggccaagaacggccgcctggtgacggtatccgagggtgaagccttgattagccgctacaagatcgtaaagagcgaaaccgggcggccggagtacatcgagatcgagctagctgattggatgtaccgcgagatcacagaaggcaagaacccggacgtgctgacggttcaccccgattactttttgatcgatcccggcatcggccgttttctctaccgcctggcacgccgcgccgcaggcaaggcagaagccagatggttgttcaagacgatctacgaacgcagtggcagcgccggagagttcaagaagttctgtttcaccgtgcgcaagctgatcgggtcaaatgacctgccggagtacgatttgaaggaggaggcggggcaggctggcccgatcctagtcatgcgctaccgcaacctgatcgagggcgaagcatccgccggttcctaatgtacggagcagatgctagggcaaattgccctagcaggggaaaaaggtcgaaaaggtctctttcctgtggatagcacgtacattgggaacccaaagccgtacattgggaaccggaacccgtacattgggaacccaaagccgtacattgggaaccggtcacacatgtaagtgactgatataaaagagaaaaaaggcgatttttccgcctaaaactctttaaaacttattaaaactcttaaaacccgcctggcctgtgcatatgctagtcatgccccgc

SEQ ID NO: 148 - DNA, 11110 bp, synthetic construct
  misc_feature 1..11110: note = pWISE3906 Full Plasmid Sequence
  source 1..11110: mol_type = other DNA
gcccaccggaaggagctgactgggttgaaggctctcaagggcatcggtcgagatcccggtgcctaatgagtgagctaacttacattaattgcgttgcgccccttaattaacaaaaaacccctcaagacccgtttagaggccccaaggggttatgctagttattgctcagcggaatctacacttagtagaaattacatggagggcacagttaagccgcatctacacttagtagaaattatttaatctttgaaacgctagcattatacctaggactgagctagctgtcaacaattggggatgagattatcaaaaaggatcttcacctagatccttttaaattaaaaatgaagttttaaatcaatctaaagtatatatgtgtaacattggtctagtgattggatccttgacagctagctcagtcctaggtactgtgctagcgctagcaaagaggagaaaggtaccatgcccgatcgagctcaagttatcattcgcattgtgccgggaggtggcaccaagacccttcaacaaattatcaatcagttggagtatctatcccggaagggcaggctggagctgcagcgttcagcccgacatctcgatattcccctgccaccggatcaaatccacgaacttgcccgaagctgggttcaagagactggaacttatgacgaaagtcagccagacgaggaaaggcaacaggagttgaccacccatattattgtaagcttccccgccggtacaagccaggtagcggcttatgcggcgagccgggagtgggcagccgagatgtttgggtcaggcgcaggggggggccgatacaactatcttacggccttccacatcgatcgcgaccacccacatctgcatgtcgtcgtcaatcggcgcgaacttttaggacacggctggctgaagatatctcggcgccatccccaactgaattacgacgccctgcgcataaagatggccgagatttcacttcgtcatggcattgccctcgatgcgagccgacgagcagaacgtggcatcaccgagcggccgatcacttatgcccaatatcggcgccttgagcgggagcaggctcgccaaatccgtttcgaagacgcggatttggaacagtcgtcgccgcaaggagatcatccagaattcagccaacctttcgatacatccccatttgaagcatccgcgggcggaccggaggacatgcctcggcccaacaatcggcagaatgagtcgcaagttcatctccaggagccagctggtgtcagcaacgaagccggtgtccttgtgcgggttgcattggaaacggagcgccttgctcaaccattcgtttccgaaaccattctcgcggacgacatagggagcggctcttcgcgtgttgccgagggccgtgtggagagcgcaaaccgcactcccgatattcctcgcgcagcaactgaagctgccacgcacacgacacacgaccggcagcggcgtgcaaagcgtcctcatgatgacgacggagggccgagtggagcaaaacgtgtgacattggaaggcatcgcggttgggccccaggcgaacgccggcgaacaggatggcagtagtggccccttagtacggcaagctggaacgtcacggccatctccaccgacggccacgacgcgggccagcaccgcaaccgattcattgtctgctacagcccacctccagcaacggagaggtgtcctttcaaagcgtccgcgtgaagatgatgatggagaaccgagtgaacgcaaacgcgagagagatgagcgcagcaaggacgggcgtgggggaaataggagaagcggtggctcctcgggtggcagcatgagcggctccaagaagcgccgcatcaagcaagattcaaagctggagaagttcaccaactgctactcgctgagcaagacgctgcggttcaaggccatccccgtgggcaagacccaggagaacatcgacaacaagcgcctcctggtcgaggacgagaagcgcgccgaggactacaagggcgtcaagaagctcctggaccggtattacctcagcttcatcaacgacgtgctgcactcgatcaagctcaagaacctgaacaactacatcagcctgttccgcaagaaaacgcgcaccgagaaggagaacaaagagctggagaacctggagatcaacctgcggaaggagattgcgaaagctttcaagggcaacgagggctacaagtcgctcttcaagaaagacataatcgagaccatcctgccggagttcctggacgacaaggacgagatcgcgctcgtcaactcgttcaacgggttcactacggccttcacgggtttcttcgataaccgggagaatatgtttagcgaggaggccaagtccacctccattgcgttccgctgcatcaacgagaacctgacccgctacatcagcaacatggacatcttcgagaaggtggacgccatcttcgacaagcacgaggtccaggagatcaaggagaagattctgaactcggactacgacgtggaagacttcttcgagggcgagtttttcaacttcgtcctgacccaggaggggatcgacgtttataacgccatcatcggcgggttcgtcacggagtcgggcgaaaagatcaagggcctgaacgagtatattaacctgtacaaccagaagacaaagcagaagctgccgaagttcaagccgctgtacaagcaagtcctgtccgaccgcgagtcgctgtcgttctacggcgaaggctacacctcggacgaggaggtgctggaggtgttccgcaacaccctgaacaagaatagcgaaatttttagctccattaagaagctcgagaagctgttcaagaacttcgacgagtacagcagcgccgggatcttcgtcaagaacggccccgcgatcagcaccatctcgaaggacatcttcggcgagtggaacgtcatccgggacaagtggaacgccgagtacgacgacattcaccttaaaaagaaggctgttgtgacggagaagtacgaggacgaccggcgcaagtcgttcaaaaagatcggctccttctccctggagcagctccaggagtacgccgacgccgacctctcggtcgtcgagaagctcaaggagatcatcattcagaaggtggacgaaatttacaaagtgtacggctccagcgagaagctgttcgacgccgacttcgtgctggaaaagtcgctcaagaaaaacgacgccgtggtggccatcatgaaggacttgctggacagcgtgaagtcgttcgagaactacattaaggcgttctttggcgagggcaaggagaccaaccgcgacgagtcgttctacggcgacttcgtgctcgcgtacgacatcctgctcaaggtggatcacatctacgacgcgatccgcaactacgtcacgcagaagccgtactcgaaggacaagttcaagctgtacttccagaacccgcagttcatgggcgggtgggacaaggacaaggaaacggactaccgcgcgaccatcctgcggtacggcagcaagtattatctggcgatcatggacaaaaaatatgccaagtgcctccagaaaatcgacaaggacgacgtgaacggcaactacgagaagattaattacaagctgctccccggccccaacaagatgctcccgaaggtgttctttagcaagaagtggatggcctactacaacccgagcgaggacatccagaagatctataagaatggcaccttcaagaagggagacatgtttaacctcaacgactgccacaagctgattgacttcttcaaggactcgatctcgcgctacccgaagtggtcgaacgcctacgacttcaacttcagcgaaacggagaaatacaaagacatcgcgggcttctaccgcgaggtcgaggagcaaggctacaaggtcagcttcgagtccgccagcaagaaggaggtggacaagctggtggaggagggcaagctctacatgtttcagatctacaacaaggattttagcgacaagtcgcacggcacgccgaacctgcacacgatgtacttcaagctgctgttcgacgagaacaaccacggccagatccggctgtcgggcggtgcggagctgttcatgcgccgggcgtcgctcaagaaggaagagctggtcgtccacccggccaacagccccatcgccaacaagaaccccgacaaccccaagaaaacgacgacactcagctatgatgtctataaagacaagcgcttctcggaggaccagtacgagctgcacatccccatcgccatcaacaagtgccccaagaacatcttcaagatcaacacggaggtccgcgtgctcctcaagcacgacgacaacccgtacgtcatcggcatcgaccggggcgagcgcaacctgctgtacatcgtcgtcgtcgatggcaagggcaacatcgtggagcagtattccctgaacgagatcatcaacaacttcaacggcatccgcatcaagaccgactaccactccctcctcgacaagaaggagaaagagcgcttcgaggcccgccagaactggacctccatcgagaacatcaaggagcttaaggcgggctacatctcccaagtcgtccacaagatctgcgagctggtcgagaagtacgacgcggtgatcgccctggaagacctgaactccggcttcaagaactcccgcgtaaaggtggagaagcaagtgtaccagaagttcgagaagatgctgatcgacaagctgaactacatggtggacaagaaatcgaacccgtgcgcgaccggcggcgcgctcaagggctaccagatcacgaacaagttcgagtcgttcaagtccatgagcacgcagaacggctttatcttctacatcccggcctggctgacgtcgaagatcgacccctcgaccggcttcgtgaacctgctcaagaccaagtatactagcattgccgactccaagaaattcatctcgtccttcgaccgcatcatgtacgtcccggaggaggacctttttgagttcgccctcgactacaagaacttcagccgcaccgacgccgactacatcaagaagtggaagctgtactcgtacgggaaccgcatccgtatttttcgcaacccgaagaaaaataatgtcttcgactgggaggaggtgtgcctgaccagcgcctacaaggagctgttcaacaagtacggcatcaactaccaacagggcgacatccgggcccttctctgcgagcagagcgacaaggcgttctactcgtcgttcatggccctgatgagcctgatgctccagatgaggaacagcatcaccggccgcaccgacgtggacttcctcatcagccccgtcaagaactcggacggcatattttatgactcgcggaactacgaggcccaggagaacgccatcctgcccaagaacgccgacgccaacggcgcgtacaacatcgcccgcaaggtgctctgggccatcggccagttcaagaaggcggaagacgagaagctggacaaggtgaagatcgccatctccaacaaggagtggctggagtacgcgcagacgtccgtcaagcacggctccaagaaacggcggatcaaacaagattccggtggcagttccggtggcagcagtgcgtcgttagcaagaggcggtccaaatgcagtgggactcctaacgacgaacgaaagctttgagaaaaatatcaatgaggtctacaaccgtacgcgagccgagctagacgcttcttcacgtgacagaagtcgctctggactatcgcgataatctagaccaggcatcaaataaaacgaaaggctcagtcgaaagactgggcctttcgttttatctgttgtttgtcggtgaacgctctctactagagtcacactggctcaccttcgggtgggcctttctgcgtttatagtacgatatcccaatggcgcgccgagcttggctcgagcatggtcatagctgtttcctgtgtgaaattgttatccgctcacaattccacacaacatacgagccggaagcataaagtgtaaagcctggggtgcctaatgagtgagctaactcacattaattgcgttgcgctcactgcccgctttccagtcgggaaacctgtcgtgccagctgcattaatgaatcggccaacgcgcggggagaggcggtttgcgtattgggcgctgttccgcttcctcgctcactgactcgctgcgctcggtcgttcggctgcggcgagcggtatcagctcactcaaaggcggtaatacggttatccacagaatcaggggataacgcaggaaagaacatgtgagcaaaaggccagcaaaaggccaggaaccgtaaaaaggccgcgttgctggcgtttttccataggctccgcccccctgacgagcatcacaaaaatcgacgctcaagtcagaggtggcgaaacccgacaggactataaagataccaggcgtttccccctggaagctccctcgtgcgctctcctgttccgaccctgccgcttaccggatacctgtccgcctttctcccttcgggaagcgtggcgctttctcatagctcacgctgtaggtatctcagttcggtgtaggtcgttcgctccaagctgggctgtgtgcacgaaccccccgttcagcccgaccgctgcgccttatccggtaactatcgtcttgagtccaacccggtaagacacgacttatcgccactggcagcagccactggtaacaggattagcagagcgaggtatgtaggcggtgctacagagttcttgaagtggtggcctaactacggctacactagaagaacagtatttggtatctgcgctctgctgaagccagttaccttcggaaaaagagttggtagctcttgatccggcaaacaaaccaccgctggtagcggtggtttttttgtttgcaagcagcagattacgcgcagaaaaaaaggatctcaagaagatcctttgatcttttctacggggtctgacgctcagtggaacgaaaactcacgttaagggattttggtcatgagattatcaaaaaggatcttcacctagatccttttaaattaaaaatgaagttttaaatcaatctaaagtatatatgagtaaacttggtctgacagttagaaaaactcatcgagcatcaaatgaaactgcaatttattcatatcaggattatcaataccatatttttgaaaaagccgtttctgtaatgaaggagaaaactcaccgaggcagttccataggatggcaagatcctggtatcggtctgcgattccgactcgtccaacatcaatacaacctattaatttcccctcgtcaaaaataaggttatcaagtgagaaatcaccatgagtgacgactgaatccggtgagaatggcaaaagtttatgcatttctttccagacttgttcaacaggccagccattacgctcgtcatcaaaatcactcgcatcaaccaaaccgttattcattcgtgattgcgcctgagcgaaacgaaatacgcgatcgctgttaaaaggacaattacaaacaggaatcgaatgcaaccggcgcaggaacactgccagcgcatcaacaatattttcacctgaatcaggatattcttctaatacctggaatgctgttttcccagggatcgcagtggtgagtaaccatgcatcatcaggagtacggataaaatgcttgatggtcggaagaggcataaattccgtcagccagtttagtctgaccatctcatctgtaacatcattggcaacgctacctttgccatgtttcagaaacaactctggcgcatcgggcttcccatacaatcgatagattgtcgcacctgattgcccgacattatcgcgagcccatttatacccatataaatcagcatccatgttggaatttaatcgcggcctagagcaagacgtttcccgttgaatatggctcatactcttcctttttcaatattattgaagcatttatcagggttattgtctcatgagcggatacatatttgaatgtatttagaaaaataaacaaataggggttccgcgcacatttccccgaaaagtgccacctgacgtctaagaaaccattattatcatgacattaacctataaaaataggcgtatcacgaggcccttttgtctcgcgcgtttcggtgatgacggtgaaaacctctgacacatgcagctcccggagactgtcacagcttgtctgtaagcggatgccgggagcagacaagcccgtcagggcgcgtcagcgggtgttggcgggtgtcggggctggcttaactatgcggcatcagagcagattgtactgagagtgcaccatatgcggtgtgaaataccgcacagatgcgtaaggagaaaataccgcatcaggcgccattcgccattcaggctgcgcaactgttgggaagggcgatcggtgcgggcctcttcgctattacgccagctggcgaaagggggatgtgctgcaaggcgattaagttgggtaacgccagggttttcccagtcacgacgttgtaaaacgacggccagtgaattgacgcgttgcggctgcatgaaatcctggccggtttgtctgatgccaagctggcggcctggccggccagcttggccgctgaagaaaccgagcgccgccgtctaaaaaggtgatgtgtatttgagtaaaacagcttgcgtcatgcggtcgctgcgtatatgatgcgatgagtaaataaacaaatacgcaaggggaacgcatgaaggttatcgctgtacttaaccagaaaggcgggtcaggcaagacgaccatcgcaacccatctagcccgcgccctgcaactcgccggggccgatgttctgttagtcgattccgatccccagggcagtgcccgcgattgggcggccgtgcgggaagatcaaccgctaaccgttgtcggcatcgaccgcccgacgattgaccgcgacgtgaaggccatcggccggcgcgacttcgtagtgatcgacggagcgccccaggcggcggacttggctgtgtccgcgatcaaggcagccgacttcgtgctgattccggtgcagccaagcccttacgacatatgggccaccgccgacctggtggagctggttaagcagcgcattgaggtcacggatggaaggctacaagcggcctttgtcgtgtcgcgggcgatcaaaggcacgcgcatcggcggtgaggttgccgaggcgctggccgggtacgagctgcccattcttgagtcccgtatcacgcagcgcgtgagctacccaggcactgccgccgccggcacaaccgttcttgaatcagaacccgagggcgacgctgcccgcgaggtccaggcgctggccgctgaaattaaatcaaaactcatttgagttaatgaggtaaagagaaaatgagcaaaagcacaaacacgctaagtgccggccgtccgagcgcacgcagcagcaaggctgcaacgttggccagcctggcagacacgccagccatgaagcgggtcaactttcagttgccggcggaggatcacaccaagctgaagatgtacgcggtacgccaaggcaagaccattaccgagctgctatctgaatacatcgcgcagctaccagagtaaatgagcaaatgaataaatgagtagatgaattttagcggctaaaggaggcggcatggaaaatcaagaacaaccaggcaccgacgccgtggaatgccccatgtgtggaggaacgggcggttggccaggcgtaagcggctgggttgtctgccggccctgcaatggcactggaacccccaagcccgaggaatcggcgtgagcggtcgcaaaccatccggcccggtacaaatcggcgcggcgctgggtgatgacctggtggagaagttgaaggccgcgcaggccgcccagcggcaacgcatcgaggcagaagcacgccccggtgaatcgtggcaagcggccgctgatcgaatccgcaaagaatcccggcaaccgccggcagccggtgcgccgtcgattaggaagccgcccaagggcgacgagcaaccagattttttcgttccgatgctctatgacgtgggcacccgcgatagtcgcagcatcatggacgtggccgttttccgtctgtcgaagcgtgaccgacgagctggcgaggtgatccgctacgagcttccagacgggcacgtagaggtttccgcagggccggccggcatggccagtgtgtgggattacgacctggtactgatggcggtttcccatctaaccgaatccatgaaccgataccgggaagggaagggagacaagcccggccgcgtgttccgtccacacgttgcggacgtactcaagttctgccggcgagccgatggcggaaagcagaaagacgacctggtagaaacctgcattcggttaaacaccacgcacgttgccatgcagcgtacgaagaaggccaagaacggccgcctggtgacggtatccgagggtgaagccttgattagccgctacaagatcgtaaagagcgaaaccgggcggccggagtacatcgagatcgagctagctgattggatgtaccgcgagatcacagaaggcaagaacccggacgtgctgacggttcaccccgattactttttgatcgatcccggcatcggccgttttctctaccgcctggcacgccgcgccgcaggcaaggcagaagccagatggttgttcaagacgatctacgaacgcagtggcagcgccggagagttcaagaagttctgtttcaccgtgcgcaagctgatcgggtcaaatgacctgccggagtacgatttgaaggaggaggcggggcaggctggcccgatcctagtcatgcgctaccgcaacctgatcgagggcgaagcatccgccggttcctaatgtacggagcagatgctagggcaaattgccctagcaggggaaaaaggtcgaaaaggtctctttcctgtggatagcacgtacattgggaacccaaagccgtacattgggaaccggaacccgtacattgggaacccaaagccgtacattgggaaccggtcacacatgtaagtgactgatataaaagagaaaaaaggcgatttttccgcctaaaactctttaaaacttattaaaactcttaaaacccgcctggcctgtgcatatgctagtcatgccccgc

SEQ ID NO: 149 - DNA, 28 bp, synthetic construct
  source 1..28: mol_type = other DNA
  misc_feature 1..28: note = Polyubiquitin left flank primer
gttgattctgtagtcgtagattaaggtt

SEQ ID NO: 150 - DNA, 12425 bp, synthetic construct
  misc_feature 1..12425: note = pWISE3910 Full Plasmid Sequence
  source 1..12425: mol_type = other DNA
gcccaccggaaggagctgactgggttgaaggctctcaagggcatcggtcgagatcccggtgcctaatgagtgagctaacttacattaattgcgttgcgccccgagagcgttcaccgacaaacaacagataaaacgaaaggcccagtctttcgactgagcctttcgttttatttgatgcctggttacctcgaaagcccgctgcgcgagcggtcacgcgatgaggcatccagctccgctcgggtgcggttatagacctcattgatatttttctcgaaggattcgtttgtcgtcagaaggcccactgcgttagggccgcctctggcgaggctggccgaagagccaccactgctgccgcccgaatcctgtttgatccgacgcttcttgctaccagcagaataaatgccggagttcgcggcaatagcggacgggatcggatttccatccttgaggaggccctgcatcgccttgacgatcaattcgcagtcggagttcgttgcgaatatcgggatggtgagttccatgttcaggtagctgcgccaggccgccaccggcagttcaacgccgcccacggtctgcgtcgcaactttgggaacctcgaccttgatggtgtacttccgcttctgggccgatgactggcggacggagcaggtcactttatacgcttgggaccgcgagttgctggagatccattccgccactccattggcaaaattcgagggggctacggtgacatcacccgtaccgccgttgtcgaccaggacgaattgagtgaaattgctggcgtcctgcttgatgcggcgcttcttggacccgctcatggtacctccccatctccccaagctcataaccaacacagccacttcggtcggaagaaatgctgtcatctgatgttcacgattatcgggagggtcggttactctaggatttttgttttcttcttttcgatttcatttgaagcgaaaacggctttccatgcacttaagggtgcgccgacgaaagatggctctctaagacaacggcgaggatctagaatgccgtcgaagtgaaattccagggcggaatgaacgggggatggttccaataaactgtggcacttcgcaggctccgatcagggtgtcgatcgcgccatttgcgtggcgagggtatccgcctatgccgactatcctatgtccgagctcagcgaacatatgtcttgttcttcgaagacggtatcgaagacctccagcagataatcgccaaccttcgggtctcagaagacgcaccgccacaaccgactgcccaaagcgattgcgagaaaccatagctataggcgcgccgaacagacgtgctgattaccctggtcgagtctccttaattaacaaaaaacccctcaagacccgtttagaggccccaaggggttatgctagttattgctcagcggaatctacacttagtagaaattagggaacacgagcgacatgggtgatcctcatgtcgctcgtggcacatgggtgatcctcatgtgctccctatccacatgtgtttttagtaaaatctacacttagtagaaattatttaatctttgaaacgctagcattatacctaggactgagctagctgtcaacaattggggatgagattatcaaaaaggatcttcacctagatccttttaaattaaaaatgaagttttaaatcaatctaaagtatatatgtgtaacattggtctagtgattggatccttgacagctagctcagtcctaggtactgtgctagcgctagcaaagaggagaaaggtaccatgcccgatcgagctcaagttatcattcgcattgtgccgggaggtggcaccaagacccttcaacaaattatcaatcagttggagtatctatcccggaagggcaggctggagctgcagcgttcagcccgacatctcgatattcccctgccaccggatcaaatccacgaacttgcccgaagctgggttcaagagactggaacttatgacgaaagtcagccagacgaggaaaggcaacaggagttgaccacccatattattgtaagcttccccgccggtacaagccaggtagcggcttatgcggcgagccgggagtgggcagccgagatgtttgggtcaggcgcaggggggggccgatacaactatcttacggccttccacatcgatcgcgaccacccacatctgcatgtcgtcgtcaatcggcgcgaacttttaggacacggctggctgaagatatctcggcgccatccccaactgaattacgacgccctgcgcataaagatggccgagatttcacttcgtcatggcattgccctcgatgcgagccgacgagcagaacgtggcatcaccgagcggccgatcacttatgcccaatatcggcgccttgagcgggagcaggctcgccaaatccgtttcgaagacgcggatttggaacagtcgtcgccgcaaggagatcatccagaattcagccaacctttcgatacatccccatttgaagcatccgcgggcggaccggaggacatgcctcggcccaacaatcggcagaatgagtcgcaagttcatctccaggagccagctggtgtcagcaacgaagccggtgtccttgtgcgggttgcattggaaacggagcgccttgctcaaccattcgtttccgaaaccattctcgcggacgacatagggagcggctcttcgcgtgttgccgagggccgtgtggagagcgcaaaccgcactcccgatattcctcgcgcagcaactgaagctgccacgcacacgacacacgaccggcagcggcgtgcaaagcgtcctcatgatgacgacggagggccgagtggagcaaaacgtgtgacattggaaggcatcgcggttgggccccaggcgaacgccggcgaacaggatggcagtagtggccccttagtacggcaagctggaacgtcacggccatctccaccgacggccacgacgcgggccagcaccgcaaccgattcattgtctgctacagcccacctccagcaacggagaggtgtcctttcaaagcgtccgcgtgaagatgatgatggagaaccgagtgaacgcaaacgcgagagagatgagcgcagcaaggacgggcgtgggggaaataggagaagcggtggctcctcgggtggcagcatgagcggctccaagaagcgccgcatcaagcaagattcaaagctggagaagttcaccaactgctactcgctgagcaagacgctgcggttcaaggccatccccgtgggcaagacccaggagaacatcgacaacaagcgcctcctggtcgaggacgagaagcgcgccgaggactacaagggcgtcaagaagctcctggaccggtattacctcagcttcatcaacgacgtgctgcactcgatcaagctcaagaacctgaacaactacatcagcctgttccgcaagaaaacgcgcaccgagaaggagaacaaagagctggagaacctggagatcaacctgcggaaggagattgcgaaagctttcaagggcaacgagggctacaagtcgctcttcaagaaagacataatcgagaccatcctgccggagttcctggacgacaaggacgagatcgcgctcgtcaactcgttcaacgggttcactacggccttcacgggtttcttcgataaccgggagaatatgtttagcgaggaggccaagtccacctccattgcgttccgctgcatcaacgagaacctgacccgctacatcagcaacatggacatcttcgagaaggtggacgccatcttcgacaagcacgaggtccaggagatcaaggagaagattctgaactcggactacgacgtggaagacttcttcgagggcgagtttttcaacttcgtcctgacccaggaggggatcgacgtttataacgccatcatcggcgggttcgtcacggagtcgggcgaaaagatcaagggcctgaacgagtatattaacctgtacaaccagaagacaaagcagaagctgccgaagttcaagccgctgtacaagcaagtcctgtccgaccgcgagtcgctgtcgttctacggcgaaggctacacctcggacgaggaggtgctggaggtgttccgcaacaccctgaacaagaatagcgaaatttttagctccattaagaagctcgagaagctgttcaagaacttcgacgagtacagcagcgccgggatcttcgtcaagaacggccccgcgatcagcaccatctcgaaggacatcttcggcgagtggaacgtcatccgggacaagtggaacgccgagtacgacgacattcaccttaaaaagaaggctgttgtgacggagaagtacgaggacgaccggcgcaagtcgttcaaaaagatcggctccttctccctggagcagctccaggagtacgccgacgccgacctctcggtcgtcgagaagctcaaggagatcatcattcagaaggtggacgaaatttacaaagtgtacggctccagcgagaagctgttcgacgccgacttcgtgctggaaaagtcgctcaagaaaaacgacgccgtggtggccatcatgaaggacttgctggacagcgtgaagtcgttcgagaactacattaaggcgttctttggcgagggcaaggagaccaaccgcgacgagtcgttctacggcgacttcgtgctcgcgtacgacatcctgctcaaggtggatcacatctacgacgcgatccgcaactacgtcacgcagaagccgtactcgaaggacaagttcaagctgtacttccagaacccgcagttcatgggcgggtgggacaaggacaaggaaacggactaccgcgcgaccatcctgcggtacggcagcaagtattatctggcgatcatggacaaaaaatatgccaagtgcctccagaaaatcgacaaggacgacgtgaacggcaactacgagaagattaattacaagctgctccccggccccaacaagatgctcccgaaggtgttctttagcaagaagtggatggcctactacaacccgagcgaggacatccagaagatctataagaatggcaccttcaagaagggagacatgtttaacctcaacgactgccacaagctgattgacttcttcaaggactcgatctcgcgctacccgaagtggtcgaacgcctacgacttcaacttcagcgaaacggagaaatacaaagacatcgcgggcttctaccgcgaggtcgaggagcaaggctacaaggtcagcttcgagtccgccagcaagaaggaggtggacaagctggtggaggagggcaagctctacatgtttcagatctacaacaaggattttagcgacaagtcgcacggcacgccgaacctgcacacgatgtacttcaagctgctgttcgacgagaacaaccacggccagatccggctgtcgggcggtgcggagctgttcatgcgccgggcgtcgctcaagaaggaagagctggtcgtccacccggccaacagccccatcgccaacaagaaccccgacaaccccaagaaaacgacgacactcagctatgatgtctataaagacaagcgcttctcggaggaccagtacgagctgcacatccccatcgccatcaacaagtgccccaagaacatcttcaagatcaacacggaggtccgcgtgctcctcaagcacgacgacaacccgtacgtcatcggcatcgaccggggcgagcgcaacctgctgtacatcgtcgtcgtcgatggcaagggcaacatcgtggagcagtattccctgaacgagatcatcaacaacttcaacggcatccgcatcaagaccgactaccactccctcctcgacaagaaggagaaagagcgcttcgaggcccgccagaactggacctccatcgagaacatcaaggagcttaaggcgggctacatctcccaagtcgtccacaagatctgcgagctggtcgagaagtacgacgcggtgatcgccctggaagacctgaactccggcttcaagaactcccgcgtaaaggtggagaagcaagtgtaccagaagttcgagaagatgctgatcgacaagctgaactacatggtggacaagaaatcgaacccgtgcgcgaccggcggcgcgctcaagggctaccagatcacgaacaagttcgagtcgttcaagtccatgagcacgcagaacggctttatcttctacatcccggcctggctgacgtcgaagatcgacccctcgaccggcttcgtgaacctgctcaagaccaagtatactagcattgccgactccaagaaattcatctcgtccttcgaccgcatcatgtacgtcccggaggaggacctttttgagttcgccctcgactacaagaacttcagccgcaccgacgccgactacatcaagaagtggaagctgtactcgtacgggaaccgcatccgtatttttcgcaacccgaagaaaaataatgtcttcgactgggaggaggtgtgcctgaccagcgcctacaaggagctgttcaacaagtacggcatcaactaccaacagggcgacatccgggcccttctctgcgagcagagcgacaaggcgttctactcgtcgttcatggccctgatgagcctgatgctccagatgaggaacagcatcaccggccgcaccgacgtggacttcctcatcagccccgtcaagaactcggacggcatattttatgactcgcggaactacgaggcccaggagaacgccatcctgcccaagaacgccgacgccaacggcgcgtacaacatcgcccgcaaggtgctctgggccatcggccagttcaagaaggcggaagacgagaagctggacaaggtgaagatcgccatctccaacaaggagtggctggagtacgcgcagacgtccgtcaagcacggctccaagaaacggcggatcaaacaagattccggtggcagttccggtggcagcagtgcgtcgttagcaagaggcggtccaaatgcagtgggactcctaacgacgaacgaaagctttgagaaaaatatcaatgaggtctacaaccgtacgcgagccgagctagacgcttcttcacgtgacagaagtcgctctggactatcgcgataatctagaccaggcatcaaataaaacgaaaggctcagtcgaaagactgggcctttcgttttatctgttgtttgtcggtgaacgctctctactagagtcacactggctcaccttcgggtgggcctttctgcgtttatagtacgatatcccaatggcgcgccgagcttggctcgagcatggtcatagctgtttcctgtgtgaaattgttatccgctcacaattccacacaacatacgagccggaagcataaagtgtaaagcctggggtgcctaatgagtgagctaactcacattaattgcgttgcgctcactgcccgctttccagtcgggaaacctgtcgtgccagctgcattaatgaatcggccaacgcgcggggagaggcggtttgcgtattgggcgctgttccgcttcctcgctcactgactcgctgcgctcggtcgttcggctgcggcgagcggtatcagctcactcaaaggcggtaatacggttatccacagaatcaggggataacgcaggaaagaacatgtgagcaaaaggccagcaaaaggccaggaaccgtaaaaaggccgcgttgctggcgtttttccataggctccgcccccctgacgagcatcacaaaaatcgacgctcaagtcagaggtggcgaaacccgacaggactataaagataccaggcgtttccccctggaagctccctcgtgcgctctcctgttccgaccctgccgcttaccggatacctgtccgcctttctcccttcgggaagcgtggcgctttctcatagctcacgctgtaggtatctcagttcggtgtaggtcgttcgctccaagctgggctgtgtgcacgaaccccccgttcagcccgaccgctgcgccttatccggtaactatcgtcttgagtccaacccggtaagacacgacttatcgccactggcagcagccactggtaacaggattagcagagcgaggtatgtaggcggtgctacagagttcttgaagtggtggcctaactacggctacactagaagaacagtatttggtatctgcgctctgctgaagccagttaccttcggaaaaagagttggtagctcttgatccggcaaacaaaccaccgctggtagcggtggtttttttgtttgcaagcagcagattacgcgcagaaaaaaaggatctcaagaagatcctttgatcttttctacggggtctgacgctcagtggaacgaaaactcacgttaagggattttggtcatgagattatcaaaaaggatcttcacctagatccttttaaattaaaaatgaagttttaaatcaatctaaagtatatatgagtaaacttggtctgacagttagaaaaactcatcgagcatcaaatgaaactgcaatttattcatatcaggattatcaataccatatttttgaaaaagccgtttctgtaatgaaggagaaaactcaccgaggcagttccataggatggcaagatcctggtatcggtctgcgattccgactcgtccaacatcaatacaacctattaatttcccctcgtcaaaaataaggttatcaagtgagaaatcaccatgagtgacgactgaatccggtgagaatggcaaaagtttatgcatttctttccagacttgttcaacaggccagccattacgctcgtcatcaaaatcactcgcatcaaccaaaccgttattcattcgtgattgcgcctgagcgaaacgaaatacgcgatcgctgttaaaaggacaattacaaacaggaatcgaatgcaaccggcgcaggaacactgccagcgcatcaacaatattttcacctgaatcaggatattcttctaatacctggaatgctgttttcccagggatcgcagtggtgagtaaccatgcatcatcaggagtacggataaaatgcttgatggtcggaagaggcataaattccgtcagccagtttagtctgaccatctcatctgtaacatcattggcaacgctacctttgccatgtttcagaaacaactctggcgcatcgggcttcccatacaatcgatagattgtcgcacctgattgcccgacattatcgcgagcccatttatacccatataaatcagcatccatgttggaatttaatcgcggcctagagcaagacgtttcccgttgaatatggctcatactcttcctttttcaatattattgaagcatttatcagggttattgtctcatgagcggatacatatttgaatgtatttagaaaaataaacaaataggggttccgcgcacatttccccgaaaagtgccacctgacgtctaagaaaccattattatcatgacattaacctataaaaataggcgtatcacgaggcccttttgtctcgcgcgtttcggtgatgacggtgaaaacctctgacacatgcagctcccggagactgtcacagcttgtctgtaagcggatgccgggagcagacaagcccgtcagggcgcgtcagcgggtgttggcgggtgtcggggctggcttaactatgcggcatcagagcagattgtactgagagtgcaccatatgcggtgtgaaataccgcacagatgcgtaaggagaaaataccgcatcaggcgccattcgccattcaggctgcgcaactgttgggaagggcgatcggtgcgggcctcttcgctattacgccagctggcgaaagggggatgtgctgcaaggcgattaagttgggtaacgccagggttttcccagtcacgacgttgtaaaacgacggccagtgaattgacgcgttgcggctgcatgaaatcctggccggtttgtctgatgccaagctggcggcctggccggccagcttggccgctgaagaaaccgagcgccgccgtctaaaaaggtgatgtgtatttgagtaaaacagcttgcgtcatgcggtcgctgcgtatatgatgcgatgagtaaataaacaaatacgcaaggggaacgcatgaaggttatcgctgtacttaaccagaaaggcgggtcaggcaagacgaccatcgcaacccatctagcccgcgccctgcaactcgccggggccgatgttctgttagtcgattccgatccccagggcagtgcccgcgattgggcggccgtgcgggaagatcaaccgctaaccgttgtcggcatcgaccgcccgacgattgaccgcgacgtgaaggccatcggccggcgcgacttcgtagtgatcgacggagcgccccaggcggcggacttggctgtgtccgcgatcaaggcagccgacttcgtgctgattccggtgcagccaagcccttacgacatatgggccaccgccgacctggtggagctggttaagcagcgcattgaggtcacggatggaaggctacaagcggcctttgtcgtgtcgcgggcgatcaaaggcacgcgcatcggcggtgaggttgccgaggcgctggccgggtacgagctgcccattcttgagtcccgtatcacgcagcgcgtgagctacccaggcactgccgccgccggcacaaccgttcttgaatcagaacccgagggcgacgctgcccgcgaggtccaggcgctggccgctgaaattaaatcaaaactcatttgagttaatgaggtaaagagaaaatgagcaaaagcacaaacacgctaagtgccggccgtccgagcgcacgcagcagcaaggctgcaacgttggccagcctggcagacacgccagccatgaagcgggtcaactttcagttgccggcggaggatcacaccaagctgaagatgtacgcggtacgccaaggcaagaccattaccgagctgctatctgaatacatcgcgcagctaccagagtaaatgagcaaatgaataaatgagtagatgaattttagcggctaaaggaggcggcatggaaaatcaagaacaaccaggcaccgacgccgtggaatgccccatgtgtggaggaacgggcggttggccaggcgtaagcggctgggttgtctgccggccctgcaatggcactggaacccccaagcccgaggaatcggcgtgagcggtcgcaaaccatccggcccggtacaaatcggcgcggcgctgggtgatgacctggtggagaagttgaaggccgcgcaggccgcccagcggcaacgcatcgaggcagaagcacgccccggtgaatcgtggcaagcggccgctgatcgaatccgcaaagaatcccggcaaccgccggcagccggtgcgccgtcgattaggaagccgcccaagggcgacgagcaaccagattttttcgttccgatgctctatgacgtgggcacccgcgatagtcgcagcatcatggacgtggccgttttccgtctgtcgaagcgtgaccgacgagctggcgaggtgatccgctacgagcttccagacgggcacgtagaggtttccgcagggccggccggcatggccagtgtgtgggattacgacctggtactgatggcggtttcccatctaaccgaatccatgaaccgataccgggaagggaagggagacaagcccggccgcgtgttccgtccacacgttgcggacgtactcaagttctgccggcgagccgatggcggaaagcagaaagacgacctggtagaaacctgcattcggttaaacaccacgcacgttgccatgcagcgtacgaagaaggccaagaacggccgcctggtgacggtatccgagggtgaagccttgattagccgctacaagatcgtaaagagcgaaaccgggcggccggagtacatcgagatcgagctagctgattggatgtaccgcgagatcacagaaggcaagaacccggacgtgctgacggttcaccccgattactttttgatcgatcccggcatcggccgttttctctaccgcctggcacgccgcgccgcaggcaaggcagaagccagatggttgttcaagacgatctacgaacgcagtggcagcgccggagagttcaagaagttctgtttcaccgtgcgcaagctgatcgggtcaaatgacctgccggagtacgatttgaaggaggaggcggggcaggctggcccgatcctagtcatgcgctaccgcaacctgatcgagggcgaagcatccgccggttcctaatgtacggagcagatgctagggcaaattgccctagcaggggaaaaaggtcgaaaaggtctctttcctgtggatagcacgtacattgggaacccaaagccgtacattgggaaccggaacccgtacattgggaacccaaagccgtacattgggaaccggtcacacatgtaagtgactgatataaaagagaaaaaaggcgatttttccgcctaaaactctttaaaacttattaaaactcttaaaacccgcctggcctgtgcatatgctagtcatgccccgc

SEQ ID NO: 151 - DNA, 12425 bp, synthetic construct
  misc_feature 1..12425: note = pWISE3911 Full Plasmid Sequence
  source 1..12425: mol_type = other DNA
gcccaccggaaggagctgactgggttgaaggctctcaagggcatcggtcgagatcccggtgcctaatgagtgagctaacttacattaattgcgttgcgccccgagagcgttcaccgacaaacaacagataaaacgaaaggcccagtctttcgactgagcctttcgttttatttgatgcctggttacctcgaaagcccgctgcgcgagcggtcacgcgatgaggcatccagctccgctcgggtgcggttatagacctcattgatatttttctcgaaggattcgtttgtcgtcagaaggcccactgcgttagggccgcctctggcgaggctggccgaagagccaccactgctgccgcccgaatcctgtttgatccgacgcttcttgctaccagcagaataaatgccggagttcgcggcaatagcggacgggatcggatttccatccttgaggaggccctgcatcgccttgacgatcaattcgcagtcggagttcgttgcgaatatcgggatggtgagttccatgttcaggtagctgcgccaggccgccaccggcagttcaacgccgcccacggtctgcgtcgcaactttgggaacctcgaccttgatggtgtacttccgcttctgggccgatgactggcggacggagcaggtcactttatacgcttgggaccgcgagttgctggagatccattccgccactccattggcaaaattcgagggggctacggtgacatcacccgtaccgccgttgtcgaccaggacgaattgagtgaaattgctggcgtcctgcttgatgcggcgcttcttggacccgctcatggtacctccccatctccccaagctcataaccaacacagccacttcggtcggaagaaatgctgtcatctgatgttcacgattatcgggagggtcggttactctaggatttttgttttcttcttttcgatttcatttgaagcgaaaacggctttccatgcacttaagggtgcgccgacgaaagatggctctctaagacaacggcgaggatctagaatgccgtcgaagtgaaattccagggcggaatgaacgggggatggttccaataaactgtggcacttcgcaggctccgatcagggtgtcgatcgcgccatttgcgtggcgagggtatccgcctatgccgactatcctatgtccgagctcagcgaacatatgtcttgttcttcgaagacggtatcgaagacctccagcagataatcgccaaccttcgggtctcagaagacgcaccgccacaaccgactgcccaaagcgattgcgagaaaccatagctataggcgcgccgaacagacgtgctgattaccctggtcgagtctccttaattaacaaaaaacccctcaagacccgtttagaggccccaaggggttatgctagttattgctcagcggaatctacacttagtagaaattagggaacacgagcgacatgggtgatcctcatgtcgctcgtggcacatgggtgatcctcatgtgctccccatggagggcacagttaagccgcatctacacttagtagaaattatttaatctttgaaacgctagcattatacctaggactgagctagctgtcaacaattggggatgagattatcaaaaaggatcttcacctagatccttttaaattaaaaatgaagttttaaatcaatctaaagtatatatgtgtaacattggtctagtgattggatccttgacagctagctcagtcctaggtactgtgctagcgctagcaaagaggagaaaggtaccatgcccgatcgagctcaagttatcattcgcattgtgccgggaggtggcaccaagacccttcaacaaattatcaatcagttggagtatctatcccggaagggcaggctggagctgcagcgttcagcccgacatctcgatattcccctgccaccggatcaaatccacgaacttgcccgaagctgggttcaagagactggaacttatgacgaaagtcagccagacgaggaaaggcaacaggagttgaccacccatattattgtaagcttccccgccggtacaagccaggtagcggcttatgcggcgagccgggagtgggcagccgagatgtttgggtcaggcgcaggggggggccgatacaactatcttacggccttccacatcgatcgcgaccacccacatctgcatgtcgtcgtcaatcggcgcgaacttttaggacacggctggctgaagatatctcggcgccatccccaactgaattacgacgccctgcgcataaagatggccgagatttcacttcgtcatggcattgccctcgatgcgagccgacgagcagaacgtggcatcaccgagcggccgatcacttatgcccaatatcggcgccttgagcgggagcaggctcgccaaatccgtttcgaagacgcggatttggaacagtcgtcgccgcaaggagatcatccagaattcagccaacctttcgatacatccccatttgaagcatccgcgggcggaccggaggacatgcctcggcccaacaatcggcagaatgagtcgcaagttcatctccaggagccagctggtgtcagcaacgaagccggtgtccttgtgcgggttgcattggaaacggagcgccttgctcaaccattcgtttccgaaaccattctcgcggacgacatagggagcggctcttcgcgtgttgccgagggccgtgtggagagcgcaaaccgcactcccgatattcctcgcgcagcaactgaagctgccacgcacacgacacacgaccggcagcggcgtgcaaagcgtcctcatgatgacgacggagggccgagtggagcaaaacgtgtgacattggaaggcatcgcggttgggccccaggcgaacgccggcgaacaggatggcagtagtggccccttagtacggcaagctggaacgtcacggccatctccaccgacggccacgacgcgggccagcaccgcaaccgattcattgtctgctacagcccacctccagcaacggagaggtgtcctttcaaagcgtccgcgtgaagatgatgatggagaaccgagtgaacgcaaacgcgagagagatgagcgcagcaaggacgggcgtgggggaaataggagaagcggtggctcctcgggtggcagcatgagcggctccaagaagcgccgcatcaagcaagattcaaagctggagaagttcaccaactgctactcgctgagcaagacgctgcggttcaaggccatccccgtgggcaagacccaggagaacatcgacaacaagcgcctcctggtcgaggacgagaagcgcgccgaggactacaagggcgtcaagaagctcctggaccggtattacctcagcttcatcaacgacgtgctgcactcgatcaagctcaagaacctgaacaactacatcagcctgttccgcaagaaaacgcgcaccgagaaggagaacaaagagctggagaacctggagatcaacctgcggaaggagattgcgaaagctttcaagggcaacgagggctacaagtcgctcttcaagaaagacataatcgagaccatcctgccggagttcctggacgacaaggacgagatcgcgctcgtcaactcgttcaacgggttcactacggccttcacgggtttcttcgataaccgggagaatatgtttagcgaggaggccaagtccacctccattgcgttccgctgcatcaacgagaacctgacccgctacatcagcaacatggacatcttcgagaaggtggacgccatcttcgacaagcacgaggtccaggagatcaaggagaagattctgaactcggactacgacgtggaagacttcttcgagggcgagtttttcaacttcgtcctgacccaggaggggatcgacgtttataacgccatcatcggcgggttcgtcacggagtcgggcgaaaagatcaagggcctgaacgagtatattaacctgtacaaccagaagacaaagcagaagctgccgaagttcaagccgctgtacaagcaagtcctgtccgaccgcgagtcgctgtcgttctacggcgaaggctacacctcggacgaggaggtgctggaggtgttccgcaacaccctgaacaagaatagcgaaatttttagctccattaagaagctcgagaagctgttcaagaacttcgacgagtacagcagcgccgggatcttcgtcaagaacggccccgcgatcagcaccatctcgaaggacatcttcggcgagtggaacgtcatccgggacaagtggaacgccgagtacgacgacattcaccttaaaaagaaggctgttgtgacggagaagtacgaggacgaccggcgcaagtcgttcaaaaagatcggctccttctccctggagcagctccaggagtacgccgacgccgacctctcggtcgtcgagaagctcaaggagatcatcattcagaaggtggacgaaatttacaaagtgtacggctccagcgagaagctgttcgacgccgacttcgtgctggaaaagtcgctcaagaaaaacgacgccgtggtggccatcatgaaggacttgctggacagcgtgaagtcgttcgagaactacattaaggcgttctttggcgagggcaaggagaccaaccgcgacgagtcgttctacggcgacttcgtgctcgcgtacgacatcctgctcaaggtggatcacatctacgacgcgatccgcaactacgtcacgcagaagccgtactcgaaggacaagttcaagctgtacttccagaacccgcagttcatgggcgggtgggacaaggacaaggaaacggactaccgcgcgaccatcctgcggtacggcagcaagtattatctggcgatcatggacaaaaaatatgccaagtgcctccagaaaatcgacaaggacgacgtgaacggcaactacgagaagattaattacaagctgctccccggccccaacaagatgctcccgaaggtgttctttagcaagaagtggatggcctactacaacccgagcgaggacatccagaagatctataagaatggcaccttcaagaagggagacatgtttaacctcaacgactgccacaagctgattgacttcttcaaggactcgatctcgcgctacccgaagtggtcgaacgcctacgacttcaacttcagcgaaacggagaaatacaaagacatcgcgggcttctaccgcgaggtcgaggagcaaggctacaaggtcagcttcgagtccgccagcaagaaggaggtggacaagctggtggaggagggcaagctctacatgtttcagatctacaacaaggattttagcgacaagtcgcacggcacgccgaacctgcacacgatgtacttcaagctgctgttcgacgagaacaaccacggccagatccggctgtcgggcggtgcggagctgttcatgcgccgggcgtcgctcaagaaggaagagctggtcgtccacccggccaacagccccatcgccaacaagaaccccgacaaccccaagaaaacgacgacactcagctatgatgtctataaagacaagcgcttctcggaggaccagtacgagctgcacatccccatcgccatcaacaagtgccccaagaacatcttcaagatcaacacggaggtccgcgtgctcctcaagcacgacgacaacccgtacgtcatcggcatcgaccggggcgagcgcaacctgctgtacatcgtcgtcgtcgatggcaagggcaacatcgtggagcagtattccctgaacgagatcatcaacaacttcaacggcatccgcatcaagaccgactaccactccctcctcgacaagaaggagaaagagcgcttcgaggcccgccagaactggacctccatcgagaacatcaaggagcttaaggcgggctacatctcccaagtcgtccacaagatctgcgagctggtcgagaagtacgacgcggtgatcgccctggaagacctgaactccggcttcaagaactcccgcgtaaaggtggagaagcaagtgtaccagaagttcgagaagatgctgatcgacaagctgaactacatggtggacaagaaatcgaacccgtgcgcgaccggcggcgcgctcaagggctaccagatcacgaacaagttcgagtcgttcaagtccatgagcacgcagaacggctttatcttctacatcccggcctggctgacgtcgaagatcgacccctcgaccggcttcgtgaacctgctcaagaccaagtatactagcattgccgactccaagaaattcatctcgtccttcgaccgcatcatgtacgtcccggaggaggacctttttgagttcgccctcgactacaagaacttcagccgcaccgacgccgactacatcaagaagtggaagctgtactcgtacgggaaccgcatccgtatttttcgcaacccgaagaaaaataatgtcttcgactgggaggaggtgtgcctgaccagcgcctacaaggagctgttcaacaagtacggcatcaactaccaacagggcgacatccgggcccttctctgcgagcagagcgacaaggcgttctactcgtcgttcatggccctgatgagcctgatgctccagatgaggaacagcatcaccggccgcaccgacgtggacttcctcatcagccccgtcaagaactcggacggcatattttatgactcgcggaactacgaggcccaggagaacgccatcctgcccaagaacgccgacgccaacggcgcgtacaacatcgcccgcaaggtgctctgggccatcggccagttcaagaaggcggaagacgagaagctggacaaggtgaagatcgccatctccaacaaggagtggctggagtacgcgcagacgtccgtcaagcacggctccaagaaacggcggatcaaacaagattccggtggcagttccggtggcagcagtgcgtcgttagcaagaggcggtccaaatgcagtgggactcctaacgacgaacgaaagctttgagaaaaatatcaatgaggtctacaaccgtacgcgagccgagctagacgcttcttcacgtgacagaagtcgctctggactatcgcgataatctagaccaggcatcaaataaaacgaaaggctcagtcgaaagactgggcctttcgttttatctgttgtttgtcggtgaacgctctctactagagtcacactggctcaccttcgggtgggcctttctgcgtttatagtacgatatcccaatggcgcgccgagcttggctcgagcatggtcatagctgtttcctgtgtgaaattgttatccgctcacaattccacacaacatacgagccggaagcataaagtgtaaagcctggggtgcctaatgagtgagctaactcacattaattgcgttgcgctcactgcccgctttccagtcgggaaacctgtcgtgccagctgcattaatgaatcggccaacgcgcggggagaggcggtttgcgtattgggcgctgttccgcttcctcgctcactgactcgctgcgctcggtcgttcggctgcggcgagcggtatcagctcactcaaaggcggtaatacggttatccacagaatcaggggataacgcaggaaagaacatgtgagcaaaaggccagcaaaaggccaggaaccgtaaaaaggccgcgttgctggcgtttttccataggctccgcccccctgacgagcatcacaaaaatcgacgctcaagtcagaggtggcgaaacccgacaggactataaagataccaggcgtttccccctggaagctccctcgtgcgctctcctgttccgaccctgccgcttaccggatacctgtccgcctttctcccttcgggaagcgtggcgctttctcatagctcacgctgtaggtatctcagttcggtgtaggtcgttcgctccaagctgggctgtgtgcacgaaccccccgttcagcccgaccgctgcgccttatccggtaactatcgtcttgagtccaacccggtaagacacgacttatcgccactggcagcagccactggtaacaggattagcagagcgaggtatgtaggcggtgctacagagttcttgaagtggtggcctaactacggctacactagaagaacagtatttggtatctgcgctctgctgaagccagttaccttcggaaaaagagttggtagctcttgatccggcaaacaaaccaccgctggtagcggtggtttttttgtttgcaagcagcagattacgcgcagaaaaaaaggatctcaagaagatcctttgatcttttctacggggtctgacgctcagtggaacgaaaactcacgttaagggattttggtcatgagattatcaaaaaggatcttcacctagatccttttaaattaaaaatgaagttttaaatcaatctaaagtatatatgagtaaacttggtctgacagttagaaaaactcatcgagcatcaaatgaaactgcaatttattcatatcaggattatcaataccatatttttgaaaaagccgtttctgtaatgaaggagaaaactcaccgaggcagttccataggatggcaagatcctggtatcggtctgcgattccgactcgtccaacatcaatacaacctattaatttcccctcgtcaaaaataaggttatcaagtgagaaatcaccatgagtgacgactgaatccggtgagaatggcaaaagtttatgcatttctttccagacttgttcaacaggccagccattacgctcgtcatcaaaatcactcgcatcaaccaaaccgttattcattcgtgattgcgcctgagcgaaacgaaatacgcgatcgctgttaaaaggacaattacaaacaggaatcgaatgcaaccggcgcaggaacactgccagcgcatcaacaatattttcacctgaatcaggatattcttctaatacctggaatgctgttttcccagggatcgcagtggtgagtaaccatgcatcatcaggagtacggataaaatgcttgatggtcggaagaggcataaattccgtcagccagtttagtctgaccatctcatctgtaacatcattggcaacgctacctttgccatgtttcagaaacaactctggcgcatcgggcttcccatacaatcgatagattgtcgcacctgattgcccgacattatcgcgagcccatttatacccatataaatcagcatccatgttggaatttaatcgcggcctagagcaagacgtttcccgttgaatatggctcatactcttcctttttcaatattattgaagcatttatcagggttattgtctcatgagcggatacatatttgaatgtatttagaaaaataaacaaataggggttccgcgcacatttccccgaaaagtgccacctgacgtctaagaaaccattattatcatgacattaacctataaaaataggcgtatcacgaggcccttttgtctcgcgcgtttcggtgatgacggtgaaaacctctgacacatgcagctcccggagactgtcacagcttgtctgtaagcggatgccgggagcagacaagcccgtcagggcgcgtcagcgggtgttggcgggtgtcggggctggcttaactatgcggcatcagagcagattgtactgagagtgcaccatatgcggtgtgaaataccgcacagatgcgtaaggagaaaataccgcatcaggcgccattcgccattcaggctgcgcaactgttgggaagggcgatcggtgcgggcctcttcgctattacgccagctggcgaaagggggatgtgctgcaaggcgattaagttgggtaacgccagggttttcccagtcacgacgttgtaaaacgacggccagtgaattgacgcgttgcggctgcatgaaatcctggccggtttgtctgatgccaagctggcggcctggccggccagcttggccgctgaagaaaccgagcgccgccgtctaaaaaggtgatgtgtatttgagtaaaacagcttgcgtcatgcggtcgctgcgtatatgatgcgatgagtaaataaacaaatacgcaaggggaacgcatgaaggttatcgctgtacttaaccagaaaggcgggtcaggcaagacgaccatcgcaacccatctagcccgcgccctgcaactcgccggggccgatgttctgttagtcgattccgatccccagggcagtgcccgcgattgggcggccgtgcgggaagatcaaccgctaaccgttgtcggcatcgaccgcccgacgattgaccgcgacgtgaaggccatcggccggcgcgacttcgtagtgatcgacggagcgccccaggcggcggacttggctgtgtccgcgatcaaggcagccgacttcgtgctgattccggtgcagccaagcccttacgacatatgggccaccgccgacctggtggagctggttaagcagcgcattgaggtcacggatggaaggctacaagcggcctttgtcgtgtcgcgggcgatcaaaggcacgcgcatcggcggtgaggttgccgaggcgctggccgggtacgagctgcccattcttgagtcccgtatcacgcagcgcgtgagctacccaggcactgccgccgccggcacaaccgttcttgaatcagaacccgagggcgacgctgcccgcgaggtccaggcgctggccgctgaaattaaatcaaaactcatttgagttaatgaggtaaagagaaaatgagcaaaagcacaaacacgctaagtgccggccgtccgagcgcacgcagcagcaaggctgcaacgttggccagcctggcagacacgccagccatgaagcgggtcaactttcagttgccggcggaggatcacaccaagctgaagatgtacgcggtacgccaaggcaagaccattaccgagctgctatctgaatacatcgcgcagctaccagagtaaatgagcaaatgaataaatgagtagatgaattttagcggctaaaggaggcggcatggaaaatcaagaacaaccaggcaccgacgccgtggaatgccccatgtgtggaggaacgggcggttggccaggcgtaagcggctgggttgtctgccggccctgcaatggcactggaacccccaagcccgaggaatcggcgtgagcggtcgcaaaccatccggcccggtacaaatcggcgcggcgctgggtgatgacctggtggagaagttgaaggccgcgcaggccgcccagcggcaacgcatcgaggcagaagcacgccccggtgaatcgtggcaagcggccgctgatcgaatccgcaaagaatcccggcaaccgccggcagccggtgcgccgtcgattaggaagccgcccaagggcgacgagcaaccagattttttcgttccgatgctctatgacgtgggcacccgcgatagtcgcagcatcatggacgtggccgttttccgtctgtcgaagcgtgaccgacgagctggcgaggtgatccgctacgagcttccagacgggcacgtagaggtttccgcagggccggccggcatggccagtgtgtgggattacgacctggtactgatggcggtttcccatctaaccgaatccatgaaccgataccgggaagggaagggagacaagcccggccgcgtgttccgtccacacgttgcggacgtactcaagttctgccggcgagccgatggcggaaagcagaaagacgacctggtagaaacctgcattcggttaaacaccacgcacgttgccatgcagcgtacgaagaaggccaagaacggccgcctggtgacggtatccgagggtgaagccttgattagccgctacaagatcgtaaagagcgaaaccgggcggccggagtacatcgagatcgagctagctgattggatgtaccgcgagatcacagaaggcaagaacccggacgtgctgacggttcaccccgattactttttgatcgatcccggcatcggccgttttctctaccgcctggcacgccgcgccgcaggcaaggcagaagccagatggttgttcaagacgatctacgaacgcagtggcagcgccggagagttcaagaagttctgtttcaccgtgcgcaagctgatcgggtcaaatgacctgccggagtacgatttgaaggaggaggcggggcaggctggcccgatcctagtcatgcgctaccgcaacctgatcgagggcgaagcatccgccggttcctaatgtacggagcagatgctagggcaaattgccctagcaggggaaaaaggtcgaaaaggtctctttcctgtggatagcacgtacattgggaacccaaagccgtacattgggaaccggaacccgtacattgggaacccaaagccgtacattgggaaccggtcacacatgtaagtgactgatataaaagagaaaaaaggcgatttttccgcctaaaactctttaaaacttattaaaactcttaaaacccgcctggcctgtgcatatgctagtcatgccccgc

SEQ ID NO: 152 - DNA, 22 bp, synthetic construct
  misc_feature 1..22: note = Tobacco PDS PCR Primer Reverse
  source 1..22: mol_type = other DNA
ttcaaaccgctcctaattgctg

SEQ ID NO: 153 - DNA, 22 bp, synthetic construct
  misc_feature 1..22: note = Tobacco PDS PCR Primer Forward
  source 1..22: mol_type = other DNA
catagtccacaacgtgaaacac

SEQ ID NO: 154 - DNA, 20 bp, synthetic construct
  misc_feature 1..20: note = Yeast URA3 PCR Primer Reverse
  source 1..20: mol_type = other DNA
ttagcatcccttccctttgc

SEQ ID NO: 155 - DNA, 22 bp, synthetic construct
  misc_feature 1..22: note = Yeast URA3 PCR Primer Forward
  source 1..22: mol_type = other DNA
gcgaggcatatttatggtgaag

SEQ ID NO: 156 - DNA, 10901 bp, Nicotiana bethamiana
  misc_feature 3734..4041: note = n is a, c, g, or t
  misc_feature 5335: note = n is a, c, g, or t
  misc_feature 6264: note = n is a, c, g, or t
  misc_feature 6646..7576: note = n is a, c, g, or t
  source 1..10901: mol_type = genomic DNA; note = Nicotiana bethamiana
cattcatttacagatctacaaagattcttatcatatttgtttacgatttacccctatatattttcgattatttttaggcttataaaatacgaatataatttctgagttaaataatagaccttttttggtttccttactaaaacactcattcgacttttctttttcacccgagacaaaaagatattcactatatttaaaatgggtataattcataagaacaaaatataatctcgaaaagattaaattgcacgtgtacaaaatttataagatgttgaatggagtctcagtaagttaggtacacatttaggcatatacagaaaagattgatataaatttcctttttatattaaaaaaatgtaatttactatagaatacaaagaagaaacaattactactactaggaaccatcaacggataaggttatttctctcttaaccaaaagttttgtgttcgagtcgagtacttatgaaaaaatttgtccgagcggggttatgtgcggtacggatttcaatataatcgagttttaatacggatatcgaacactgaattaaaaactaaaaaagaattgtgaaaatagcatgggttagctagttttcggattggtaattaaaaaatagccagcatttataaagtcattgaaaaataataactattttgctacaaattcaaatataatgtaattggtgcacgaacttctagcatattatgatggaactccaacacacaaaaaatttcaaaataatatactgaaaattggagtacctatgtatgaactttcagaatattataccggatcaatatattatgctgaaatatttttcggactttaaataatttctttatttaaatttatttttatacaaaaataactaaatttcaattacttttaaaattatgattatttttcaattaccacttatacatcctgctattttgaatttcacccgaaagaactactactatacgtggatcctcaatgacccagtaacccaagtgggagatgtgtgcaaagtggtcaaatcttagaaggaatgagcaaagcaagaaattaaaaagagagacagagaggtgttatccatcaaatgtggctatggtcggaatagccaatggtgggacagtctagccaaacataaaggccggtccagtgcgagttgctgcaaattgagttggagtaaaaaattaagataccatatttccagctaaatagcaaacaaatgacccaccattaacggaagtggccaaaccaccaaattcaggcatctccaccaaaaattagttttttatacacgaaagattcaacaattagtatttctttaagccttcctaattctttgtcaggggtatctttttgtgggtaacagccaaaccaccacaaattttcagttcccactcttaactctttttaacttcaacacaacaaattttttgcttttccttctttgtttatcttgtgcataacgatttcctacaactttagcataatcttggtttgtaatccacaacgtgaaacacatcacctaggcggtttcataccgaggtaacaaatgattttggtttctttggttacatcagctgaatgctttacttgagaaaagctttctccttttcccgtttaggatcttgtttatttgctttcgtttttctactcgttaaaattttaacttgattttgtgggtgaattataactttactcatagtgcgagaacaagtttcgtatggactgtaaaagctagaatcttttttacttttgcatataaatttgtgtaataaatgcttaagaaccagaatattgaaaaaacaaaggaattctacatagtatttaggttcacaagtgggacaatcttcttacagtgaaatatctttatgtcaggcttaatttactgctattttgttcagtaaaatgccccaaattggacttgtttctgccgttaatttgagagtccaaggtaattcagcttatctttggagctcgaggtcttctttgggaactgaaagtcaagatggtcgcttgcaaaggaatttgttatgttttggtagtagcgactccatggggcataagtttagaattcgtactcccagtgccatgaccagaagattgacaaaggacttcaatcctttaaaggtttgttttgaatgcgaaagtgtgatgctgaatttatgatcacgagcatatattctctaaaataagatatcttgccattcaggtagtctgcattgattatccaagaccggagctagacaatacagttaactatttggaggcggcgttatcatcatcatcatttcgtacttcctcacgcccaacaaaaccattggagattgttattgctggtgcaggtgattttttccagtcatctatatttgtagtcttcatttttctttctttggaaggaagatcattctattagttgtattatcactagaacatttattgtgcattcttttcttattaactgttttggaccgcaaaattttaagttcttacttcttcgcctcccaactgattagattaggagtgatttgaaaattagtttgttttgagctatttttgccgtcactcatatactgttgagttgtcccacatcggtgagatttgaagtccttggtctcacctcataagttagcttttggggttgagttaggcccaatatccatttatcatagtacgagagccaggcccatcccagttattgttaccaatgtcgggctcctatttatgttgtccacgctccagtttgcaagcctaggcgtgggggaggggggtgttgagttgtcccacatccgtgggatttgaggtacttggtctccttatatggtcttggacaatccataagctagcttttggggttgagttcggcccaatgttcatttatcatatatatatatatatatatatatgtctattctctcttaccatctgagccatgataagcgggtgaacgtgctgtctattggatggcatgtccgatggatcattccgaaatattggaggcagatgaaccaataccttgtgcaagattgatatcactatacctataatcagagtacttagagttccaaaaatttgcagaacccattgaaaagtcaaacaagttacatataggggttgcactcttctaaggcttgcaatctgtgagaaaaagatgagaaggagatcttcatatttcatctttattaggctggaccattgaccggttagcagttttgaacttgttcttcaacttggcttgcatagtactgtgccgatcatttcttttgtattgtcatcaactggttgattatttgagtacctaaagaaagaatgttatgcatgatacattgtgctgtactataaaagatataataaagaatgctagccgaggtactacatggccttttcagacaaatagaagctgtagcatgattctaattcgatttgttttgaaatatcaggtttgggtggcttgtctacagcaaaatatctggcagatgctggtcacaaaccgatattgctggaggcaagagatgtcctaggtggaaaggtgaagaatatccaatctttcctttaattttattcctttttcttctgtgtccttgcctattggtagtccctgttcaggaaggcttctgtttgttttatttaaaatcatttttcatactctttaaacattcagttgctcaaacaattgcaagggtgttcactattcctatttttgactgtcttactttctctcagtttagttttattcccctcnnnnnnnnnnnnnnnnnnnnnnnnnnnnnnnnnnnnnnnnnnnnnnnnnnnnnnnnnnnnnnnnnnnnnnnnnnnnnnnnnnnnnnnnnnnnnnnnnnnnnnnnnnnnnnnnnnnnnnnnnnnnnnnnnnnnnnnnnnnnnnnnnnnnnnnnnnnnnnnnnnnnnnnnnnnnnnnnnnnnnnnnnnnnnnnnnnnnnnnnnnnnnnnnnnnnnnnnnnnnnnnnnnnnnnnnnnnnnnnnnnnnnnnnnnnnnnnnnnnnnnnnnnnnnnnnnnnnnnnnnnnnnnnnnnnnnnnnnnnnnnnnnnnnccccccccctgtctctctctctctctctgtttttggaggaaatagatctgtcctaaaaacttccagctttactactaatagtgttaattgtcgagaaaatattacagcatattaggtatatggaaagtatattattattctctattattttaagattgagtcaattttacccgtcctgttggttgcatttctcacataaacagtcttttctgtgagatgctatgttaattagctgatgtttttggtatagagcactatgttagttttatctttactgaagcagtcaccaagaatctagttgtataggctaaaagattgaattagcattaatctttatgtgttttgcacctgaatacctatacctaccttttaggtagctgcatggaaagatgatgatggagattggtacgagactgggttgcacatattctgtaagtttgactcctcaagaatgcatactttaatcttctaatacaacagtttctttcaagatctcttttctctattaatcagatagatatcgctgtttgtgttttgtcttttgcaaatagccaatttttgtcagtcgatctgtattctgccttgcctatctttttttatctgttaatttcatatggtgactcatacaagttggtgcatcccctttaagttggggcttacccaaatatgcagaacctgtttggagaactagggattaacgatcggttgcagtggaaggaacattcgatgatatttgcgatgcctaacaagccgggggagttcagccgctttgattttcctgaagctcttcctgcgccattaaatggttagtacttaatcatgatttctcccttctgcattgattatccaataaggtatgaaattgattagtccattgaccattaatactctggcacattgctaacatcaaaagaacataaaggttcattatgtcttgatcagaatttctgcatgtagctaaagtgattgagtgtctgtgtatatttttatacattgcaagcataagccagttatgttatctcttattttcatttctctatcgatgcgttattacttctacaggaattttagccatactaaagaacaacgaaatgcttacatggcccgaaaaaatcaaatttgctattggactcttgccagcaatgcttggagggcaatcttatgttgaagctcaagacggtttaagtgttaaggactggatgagaaagcaagtatgtgatcgttttatcttattctttaaagttcataaccttgaggacatagttgacttgcatgttgttgatttaacatgttnatgtgatcgttttatcttactctttaaagttcataaccttgaggacatagttgacttgcatgttgttgatttaacatgttagaattgtctacctgcctttctttttttaacaacatacatcttacaaatctcagcagcagctatttgcttaattgcttttcagggtgtgcctgatagggtgacagatgaggtgttcattgccatgtcaaaggcacttaacttcataaaccctgacgagctttcgatgcagtgcattttgattgctttgaacagatttcttcaggttagaatcctgatccaccctcaaaacaaaaagagagaaagggatataatccgaccaagctgtaaatcatgttagggacctgacatattggtgcaggaaacttatttgtgaacttttccactctgtttaacttttctgatatatttgaattattaatctgcaggagaaacatggttcaaaaatggcctttttagatggtaatcctcctgagagactttgcatgccaattgttgaacatattgagtcaaaaggtggccaagtcagactaaactcacgaataaaaaagattgagctgaatgaggatggaagtgtcaaatgttttatactgaataatggcagtacaattaaaggagatgcttttgtgtttgccactccaggtataatatccattatactagtatcgatgcttccagttttcacatttttaatatgaatgtataattttttgctgacttttcattatccgattagtggatatcttcaagcttcttttgcctgaagactggaaagagatcccatatttccaaaagttggagaagctagtgggagttcctgtgataaatgtccatatatggttagtgatgaaaattttgcttttcagtgtttggtcttcctctagcatatctatgtatgtgcatgttaatgnacttttcagtgtttgttcttcctctagcatatctatgtatgtgcctgttaatgtctatacatacatgtttatgtggtcctccggtattgtgttaacttcccttgagcgaggaacttatggatctacgcttttccaaaactttgattgcacacattgcaattgtctgttcaactttgatgagcagaactaccattgtttagctattagtggctgagattcctgctgaaaagatttgtataaatttaattgcaggtttgacagaaaactgaagaacacatctgataatctgctcttcagcaggttcatttttgatcaattttattgttccagagcagtttctgcgtgtccatgactacattctcatattagctccccccccccnnnnnnnnnnnnnnnnnnnnnnnnnnnnnnnnnnnnnnnnnnnnnnnnnnnnnnnnnnnnnnnnnnnnnnnnnnnnnnnnnnnnnnnnnnnnnnnnnnnnnnnnnnnnnnnnnnnnnnnnnnnnnnnnnnnnnnnnnnnnnnnnnnnnnnnnnnnnnnnnnnnnnnnnnnnnnnnnnnnnnnnnnnnnnnnnnnnnnnnnnnnnnnnnnnnnnnnnnnnnnnnnnnnnnnnnnnnnnnnnnnnnnnnnnnnnnnnnnnnnnnnnnnnnnnnnnnnnnnnnnnnnnnnnnnnnnnnnnnnnnnnnnnnnnnnnnnnnnnnnnnnnnnnnnnnnnnnnnnnnnnnnnnnnnnnnnnnnnnnnnnnnnnnnnnnnnnnnnnnnnnnnnnnnnnnnnnnnnnnnnnnnnnnnnnnnnnnnnnnnnnnnnnnnnnnnnnnnnnnnnnnnnnnnnnnnnnnnnnnnnnnnnnnnnnnnnnnnnnnnnnnnnnnnnnnnnnnnnnnnnnnnnnnnnnnnnnnnnnnnnnnnnnnnnnnnnnnnnnnnnnnnnnnnnnnnnnnnnnnnnnnnnnnnnnnnnnnnnnnnnnnnnnnnnnnnnnnnnnnnnnnnnnnnnnnnnnnnnnnnnnnnnnnnnnnnnnnnnnnnnnnnnnnnnnnnnnnnnnnnnnnnnnnnnnnnnnnnnnnnnnnnnnnnnnnnnnnnnnnnnnnnnnnnnnnnnnnnnnnnnnnnnnnnnnnnnnnnnnnnnnnnnnnnnnnnnnnnnnnnnnnnnnnnnnnnnnnnnnnnnnnnnnnnnnnnnnnnnnnnnnnnnnnnnnnnnnnnnnnnnnnnnnnnnnnnnnnnnnnnnnnnnnnnnnnnnnnnnnnnnnnnnnnnnnnnnnnnnnnnnnnnnnnnnnnnnnnnnnnnnnnnnnnnnnnnnnnnnnnnnnnnnnnnnnnacatgttatgatgaccatttctccaaggcattttatccatgccacgtttcatcagctacatgttgactatgttcccctactttttaaatggcaccattgttggtggagaaagattatagatgttcctgatacttgtatgggttcccttgctcaatctctcttttacttcatgcagaagcccattgctcagtgtgtatgctgacatgtctgttacatgtaaggtattgactcgtctgtaccattcatactggtctaatctgttggatatgagttgctggtaaattgcataatgcttgttggatttgtgtgtgagttgctgctagatctgtgtcctgctatatttatgtatgagttgctgctattgtaatcttcatttaggatgcttaatgatataggttctgtatgtatggaatagtcaggacaatgctcctgtctgtgcacaggggctctacaggaagcaactttcgaaggagaagtaaagaaagtgtgatgaacagggaaagtagtttcctttagctaccttaattcagtgttacctgcaatgttcagtgtttggagagaggcgataagcctacttcttaattttgttagaaaatgcgtacaaaatataaatcagtagttactaaaaagttggagaagtagtgggatcttttcgctatttttaacccagaataagacagctatgccatatagctttgattatccgttaacgttctgtatataaatagataattcataataatgtcgtaatactaaagcctggagatcagactgctttaactatcctgagatgattacttttactcttggattagcttaggcgagccacaagactacattgaatctttagaaatgagaacataaaaagggtgcagaagtggggaagtggctgaacgatatgcatatgggagtgagtggggagtaaaattatttcctttacttgggtacaatcaagaatgaatgacaacttagcccactatatccgttcatgtgttctttagggccctctgatataattggtctctctgcaggaatattacaaccccaatcagtctatgttggaattggtatttgcacctgcagaagagtggataaatcgtagtgactcagaaattattgatgctacaatgaaggaactagcaaagcttttccctgacgaaatttcggcagatcagagcaaagcaaaaatattgaagtatcatgttgtcaaaactccaaggccagtaatcatttgctttcatacttgtgcaatatacgagaactgcagtccacgtggaatctattcctattctgaatcctgattaatctgctttttttctctcaggtctgtttataaaactgtgccaggttgtgaaccctgtcggcccttgcaaagatctcctattgaggggttttatttagctggcgactacacaaaacagaaatacttggcttcaatggaaggtgctgtcttatcaggaaagctttgtgcccaagctattgtacaggttagttctcacagttgtttttgtccactaatagtatatttgatcaaattttgtcatctttgctgcggtagagaatttttgaagcatggacgtcaagcatgcctcttacttataattgctaatttgcggaatagttctccaaccaatatagtgttaaaccaaaaaaataaaattgtgcacacagatcacagagttgctcaggatatctgcatttttggagcctcagtagtagcatgataaaatgcagaaggttatgtttttttcattctttattaaatttatatctctatattttgcaggattacgagttacttcttggccggagccagaagaagttggcagaagcaagcgtagtttagcatggtgaactaaaatgttgcttctctacactaaatttaagatgaaggtggccacactgaattagcgttgtagacaacacatacaaggacagtacaacatttaacccaaatacgagaaatgttacacaaatatgtgctctgctttccctccgatttagttcgcaagttactaattataagatggaattgaatgaaaccaaagacggataaagaccctaaactataagataagtaagcctctccagaccatacaagtgcgcgtcgagcccatgcgaagggtttggttaagatatgccagattccaccaagtatacaaatgaaacctaaccatacatgtcctccgattatataatgcaaattgattcattcaaactaaacttttaagcgtcacagttatactagcaaatacctttaagacattaagcttcacgtcttaaaacatcaaaaaccgcttttagagtaagtatccaactgaaccatgcaaaacacaaaactgaaacaaagaacaaatggaactactaaaagagacaattaaaaattttaatttggtaaactgttaaaacgtgtttgcaagtatgagatttttttctacaaccccaagaaaactctgtcgctacagcctttgccttttgagcgagcactctgtacccattgggtaaacttcttaccgtgtaatagcttgcaaaccacacatgaatataaaccgcactaggcaagcaatgtgcgacagactcaacccagaaagcattgaagggggattaatcccaaatcatctgtatggatgaccgctcttcaaaccaaatggccatcccaaagggattgaaagtatcggatagtaatgaaccaatcagaaccacacaaaaaagaagataaatgctgaatttggagcgatggctgaatgcattgggattactttaaaaaatatttggattttctgtgtacaacttaatatttaagcaaactagatcatataatatgtactactactatgtatcattagtcaacagctgctcacttacagaaataggatcaggtagcttttgttatactctattgcacatacactgtattcagataagaaatgcaaatagatgtacgaaacaatctacgcaaaaggaatgttcttagaaaaaagaaaggctctccccaatacttatcgtatcttccctctgttggttcactgaatgtgtactgtggttttactataccctttttcctattgcagcatcattttcttctcgaaaaattcctccaatttctagggaattgctacttttcccctaccaataatttatgtacatcgtcaaggctcaaagagcaagagattatgcatatctacatagcttctcatatgtccaatacatttgtatttctgcttcttagtcctacttggcagccctgagcacgaaagcatttcgcatgcaagcagggtggggagaaaagctgcactcaagaaggtttgatgtaggtaacttattg

SEQ ID NO: 157 - DNA, 2804 bp, Saccharomyces cerevisiae
  source 1..2804: mol_type = genomic DNA
tcataaaattgataaggagaatccatacaagaaatcgatcgaattatcattgaaatccattcaactaacatcacacttgctggaagataataacgatctgcgtaaaaacgagatattcgctattattcaagctttggcacatcaatgcatcaatccgtgtaagcagataagtgaatttgcagtggtaacgctagagcagacgctcatcaataaaatcgaaattccaactaatgagatggaatcggtagaagaattaattgagggcggattactaccgttgctaaattcgagtgaaacacaggaagaccagaaaatcctcatttcatccatattaacaataatttcaaatgtttatttgcattatttgaaactagggaagacaagcaacgaaacgtttttgaaaattttgagtattttcaataaatttgtagaggactcagatattgaaaaaaagctacagcaattaatacttgataagaagagtattgagaagggcaacggttcatcatctcatggatctgcacatgaacaaacaccagagtcaaacgacgttgaaattgaggctactgcgccaattgatgacaatacagacgatgataacaaaccgaagttatctgatgtagaaaaggattaaagatgctaagagatagtgatgatatttcataaataatgtaattctatatatgttaattaccttttttgcgaggcatatttatggtgaaggataagttttgaccatcaaagaaggttaatgtggctgtggtttcagggtccataaagcttttcaattcatcttttttttttttgttcttttttttgattccggtttctttgaaatttttttgattcggtaatctccgagcagaaggaagaacgaaggaaggagcacagacttagattggtatatatacgcatatgtggtgttgaagaaacatgaaattgcccagtattcttaacccaactgcacagaacaaaaacctgcaggaaacgaagataaatcatgtcgaaagctacatataaggaacgtgctgctactcatcctagtcctgttgctgccaagctatttaatatcatgcacgaaaagcaaacaaacttgtgtgcttcattggatgttcgtaccaccaaggaattactggagttagttgaagcattaggtcccaaaatttgtttactaaaaacacatgtggatatcttgactgatttttccatggagggcacagttaagccgctaaaggcattatccgccaagtacaattttttactcttcgaagacagaaaatttgctgacattggtaatacagtcaaattgcagtactctgcgggtgtatacagaatagcagaatgggcagacattacgaatgcacacggtgtggtgggcccaggtattgttagcggtttgaagcaggcggcggaagaagtaacaaaggaacctagaggccttttgatgttagcagaattgtcatgcaagggctccctagctactggagaatatactaagggtactgttgacattgcgaagagcgacaaagattttgttatcggctttattgctcaaagagacatgggtggaagagatgaaggttacgattggttgattatgacacccggtgtgggtttagatgacaagggagacgcattgggtcaacagtatagaaccgtggatgatgtggtctctacaggatctgacattattattgttggaagaggactatttgcaaagggaagggatgctaaggtagagggtgaacgttacagaaaagcaggctgggaagcatatttgagaagatgcggccagcaaaactaaaaaactgtattataagtaaatgcatgtatactaaactcacaaattagagcttcaatttaattatatcagttattacccgggaatctcggtcgtaatgatttctataatgacgaaaaaaaaaaaattggaaagaaaaagcttcatggcctttataaaaaggaactatccaatacctcgccagaaccaagtaacagtattttacggggcacaaatcaagaacaataagacaggactgtaaagatggacgcattgaactccaaagaacaacaagagttccaaaaagtagtggaacaaaagcaaatgaaggatttcatgcgtttgtactctaatctggtagaaagatgtttcacagactgtgtcaatgacttcacaacatcaaagctaaccaataaggaacaaacatgcatcatgaagtgctcagaaaagttcttgaagcatagcgaacgtgtagggcagcgtttccaagaacaaaacgctgccttgggacaaggcttgggccgataaggtgtactggcgtatatatatctaattatgtatctctggtgtagcccatttttagcatgtaaatataaagagaaaccatatctaatctaaccaaatccaaacaaaattcaatagttactatcgcttttttctttctgtatcgcaaataagtgaaaattaaaaaagaaagattaaattggaagttggatatgggctggaacagcagcagtaatcggtatcgggttcgccactaatgacgtcctacgattgcactcaacagaccttgacgctcacgccgtagcgggcgacaagtcaaacggaacaaccgttgccgttcccatcggagtccgacctaggccgaactccgtgaatttctgataacaacggtcggtaaagactggttccccagtatatttcttctctcaggagcaggggccaatgccaaaagcgacattaacccggaggacaaggctccactgtgttccaccgaatttcccacctgataatatctgataac

SEQ ID NO: 158 - DNA, 7411 bp, synthetic construct
  misc_feature 1..7411: note = pWISE3116 Full Plasmid Sequence
  source 1..7411: mol_type = other DNA
cccaccggaaggagctgactgggttgaaggctctcaagggcatcggtcgagatcccggtgcctaatgagtgagctaacttacattaattgcgttgcgccccgggatgagattatcaaaaaggatcttcacctagatccttttaaattaaaaatgaagttttaaatcaatctaaagtatatatgtgtaacattggtctagtgattggatccttgacagctagctcagtcctaggtactgtgctagcgctagcaaagaggagaaaggtaccatgcccgatcgagctcaagttatcattcgcattgtgccgggaggtggcaccaagacccttcaacaaattatcaatcagttggagtatctatcccggaagggcaggctggagctgcagcgttcagcccgacatctcgatattcccctgccaccggatcaaatccacgaacttgcccgaagctgggttcaagagactggaacttatgacgaaagtcagccagacgaggaaaggcaacaggagttgaccacccatattattgtaagcttccccgccggtacaagccaggtagcggcttatgcggcgagccgggagtgggcagccgagatgtttgggtcaggcgcaggggggggccgatacaactatcttacggccttccacatcgatcgcgaccacccacatctgcatgtcgtcgtcaatcggcgcgaacttttaggacacggctggctgaagatatctcggcgccatccccaactgaattacgacgccctgcgcataaagatggccgagatttcacttcgtcatggcattgccctcgatgcgagccgacgagcagaacgtggcatcaccgagcggccgatcacttatgcccaatatcggcgccttgagcgggagcaggctcgccaaatccgtttcgaagacgcggatttggaacagtcgtcgccgcaaggagatcatccagaattcagccaacctttcgatacatccccatttgaagcatccgcgggcggaccggaggacatgcctcggcccaacaatcggcagaatgagtcgcaagttcatctccaggagccagctggtgtcagcaacgaagccggtgtccttgtgcgggttgcattggaaacggagcgccttgctcaaccattcgtttccgaaaccattctcgcggacgacatagggagcggctcttcgcgtgttgccgagggccgtgtggagagcgcaaaccgcactcccgatattcctcgcgcagcaactgaagctgccacgcacacgacacacgaccggcagcggcgtgcaaagcgtcctcatgatgacgacggagggccgagtggagcaaaacgtgtgacattggaaggcatcgcggttgggccccaggcgaacgccggcgaacaggatggcagtagtggccccttagtacggcaagctggaacgtcacggccatctccaccgacggccacgacgcgggccagcaccgcaaccgattcattgtctgctacagcccacctccagcaacggagaggtgtcctttcaaagcgtccgcgtgaagatgatgatggagaaccgagtgaacgcaaacgcgagagagatgagcgcagcaaggacgggcgtgggggaaataggagaagcggtggctcctcgggtggcagcatgagcggatcaaaaaaaagaaggatcaagcaagatccgccgccagcgctgccgcccaagcgccgtcgctccggcggtagcagcggtggttccccgccgccggctctgccgccgaagcgccgtagaagcggcggttcaagcggtggctctccgccaccggcactgcctccgaaacgtcgtcgttctggcggtagcagcggtggctcgccgccgccggcgttgccgccgaaacgccgtcgttccggtggcagttccggtggcagcagtgcgtcgttagcaagaggcggtccaaatgcagtgggactcctaacgacgaacgaaagctttgagaaaaatatcaatgaggtctacaaccgtacgcgagccgagctagacgcttcttcacgtgacagaagtcgctctggactatcgcgataatctagaccaggcatcaaataaaacgaaaggctcagtcgaaagactgggcctttcgttttatctgttgtttgtcggtgaacgctctctactagagtcacactggctcaccttcgggtgggcctttctgcgtttatagtacgatatcccaatggcgcgccgagcttggctcgagcatggtcatagctgtttcctgtgtgaaattgttatccgctcacaattccacacaacatacgagccggaagcataaagtgtaaagcctggggtgcctaatgagtgagctaactcacattaattgcgttgcgctcactgcccgctttccagtcgggaaacctgtcgtgccagctgcattaatgaatcggccaacgcgcggggagaggcggtttgcgtattgggcgctgttccgcttcctcgctcactgactcgctgcgctcggtcgttcggctgcggcgagcggtatcagctcactcaaaggcggtaatacggttatccacagaatcaggggataacgcaggaaagaacatgtgagcaaaaggccagcaaaaggccaggaaccgtaaaaaggccgcgttgctggcgtttttccataggctccgcccccctgacgagcatcacaaaaatcgacgctcaagtcagaggtggcgaaacccgacaggactataaagataccaggcgtttccccctggaagctccctcgtgcgctctcctgttccgaccctgccgcttaccggatacctgtccgcctttctcccttcgggaagcgtggcgctttctcatagctcacgctgtaggtatctcagttcggtgtaggtcgttcgctccaagctgggctgtgtgcacgaaccccccgttcagcccgaccgctgcgccttatccggtaactatcgtcttgagtccaacccggtaagacacgacttatcgccactggcagcagccactggtaacaggattagcagagcgaggtatgtaggcggtgctacagagttcttgaagtggtggcctaactacggctacactagaagaacagtatttggtatctgcgctctgctgaagccagttaccttcggaaaaagagttggtagctcttgatccggcaaacaaaccaccgctggtagcggtggtttttttgtttgcaagcagcagattacgcgcagaaaaaaaggatctcaagaagatcctttgatcttttctacggggtctgacgctcagtggaacgaaaactcacgttaagggattttggtcatgagattatcaaaaaggatcttcacctagatccttttaaattaaaaatgaagttttaaatcaatctaaagtatatatgagtaaacttggtctgacagttagaaaaactcatcgagcatcaaatgaaactgcaatttattcatatcaggattatcaataccatatttttgaaaaagccgtttctgtaatgaaggagaaaactcaccgaggcagttccataggatggcaagatcctggtatcggtctgcgattccgactcgtccaacatcaatacaacctattaatttcccctcgtcaaaaataaggttatcaagtgagaaatcaccatgagtgacgactgaatccggtgagaatggcaaaagtttatgcatttctttccagacttgttcaacaggccagccattacgctcgtcatcaaaatcactcgcatcaaccaaaccgttattcattcgtgattgcgcctgagcgaaacgaaatacgcgatcgctgttaaaaggacaattacaaacaggaatcgaatgcaaccggcgcaggaacactgccagcgcatcaacaatattttcacctgaatcaggatattcttctaatacctggaatgctgttttcccagggatcgcagtggtgagtaaccatgcatcatcaggagtacggataaaatgcttgatggtcggaagaggcataaattccgtcagccagtttagtctgaccatctcatctgtaacatcattggcaacgctacctttgccatgtttcagaaacaactctggcgcatcgggcttcccatacaatcgatagattgtcgcacctgattgcccgacattatcgcgagcccatttatacccatataaatcagcatccatgttggaatttaatcgcggcctagagcaagacgtttcccgttgaatatggctcatactcttcctttttcaatattattgaagcatttatcagggttattgtctcatgagcggatacatatttgaatgtatttagaaaaataaacaaataggggttccgcgcacatttccccgaaaagtgccacctgacgtctaagaaaccattattatcatgacattaacctataaaaataggcgtatcacgaggcccttttgtctcgcgcgtttcggtgatgacggtgaaaacctctgacacatgcagctcccggagactgtcacagcttgtctgtaagcggatgccgggagcagacaagcccgtcagggcgcgtcagcgggtgttggcgggtgtcggggctggcttaactatgcggcatcagagcagattgtactgagagtgcaccatatgcggtgtgaaataccgcacagatgcgtaaggagaaaataccgcatcaggcgccattcgccattcaggctgcgcaactgttgggaagggcgatcggtgcgggcctcttcgctattacgccagctggcgaaagggggatgtgctgcaaggcgattaagttgggtaacgccagggttttcccagtcacgacgttgtaaaacgacggccagtgaattgacgcgttgcggctgcatgaaatcctggccggtttgtctgatgccaagctggcggcctggccggccagcttggccgctgaagaaaccgagcgccgccgtctaaaaaggtgatgtgtatttgagtaaaacagcttgcgtcatgcggtcgctgcgtatatgatgcgatgagtaaataaacaaatacgcaaggggaacgcatgaaggttatcgctgtacttaaccagaaaggcgggtcaggcaagacgaccatcgcaacccatctagcccgcgccctgcaactcgccggggccgatgttctgttagtcgattccgatccccagggcagtgcccgcgattgggcggccgtgcgggaagatcaaccgctaaccgttgtcggcatcgaccgcccgacgattgaccgcgacgtgaaggccatcggccggcgcgacttcgtagtgatcgacggagcgccccaggcggcggacttggctgtgtccgcgatcaaggcagccgacttcgtgctgattccggtgcagccaagcccttacgacatatgggccaccgccgacctggtggagctggttaagcagcgcattgaggtcacggatggaaggctacaagcggcctttgtcgtgtcgcgggcgatcaaaggcacgcgcatcggcggtgaggttgccgaggcgctggccgggtacgagctgcccattcttgagtcccgtatcacgcagcgcgtgagctacccaggcactgccgccgccggcacaaccgttcttgaatcagaacccgagggcgacgctgcccgcgaggtccaggcgctggccgctgaaattaaatcaaaactcatttgagttaatgaggtaaagagaaaatgagcaaaagcacaaacacgctaagtgccggccgtccgagcgcacgcagcagcaaggctgcaacgttggccagcctggcagacacgccagccatgaagcgggtcaactttcagttgccggcggaggatcacaccaagctgaagatgtacgcggtacgccaaggcaagaccattaccgagctgctatctgaatacatcgcgcagctaccagagtaaatgagcaaatgaataaatgagtagatgaattttagcggctaaaggaggcggcatggaaaatcaagaacaaccaggcaccgacgccgtggaatgccccatgtgtggaggaacgggcggttggccaggcgtaagcggctgggttgtctgccggccctgcaatggcactggaacccccaagcccgaggaatcggcgtgagcggtcgcaaaccatccggcccggtacaaatcggcgcggcgctgggtgatgacctggtggagaagttgaaggccgcgcaggccgcccagcggcaacgcatcgaggcagaagcacgccccggtgaatcgtggcaagcggccgctgatcgaatccgcaaagaatcccggcaaccgccggcagccggtgcgccgtcgattaggaagccgcccaagggcgacgagcaaccagattttttcgttccgatgctctatgacgtgggcacccgcgatagtcgcagcatcatggacgtggccgttttccgtctgtcgaagcgtgaccgacgagctggcgaggtgatccgctacgagcttccagacgggcacgtagaggtttccgcagggccggccggcatggccagtgtgtgggattacgacctggtactgatggcggtttcccatctaaccgaatccatgaaccgataccgggaagggaagggagacaagcccggccgcgtgttccgtccacacgttgcggacgtactcaagttctgccggcgagccgatggcggaaagcagaaagacgacctggtagaaacctgcattcggttaaacaccacgcacgttgccatgcagcgtacgaagaaggccaagaacggccgcctggtgacggtatccgagggtgaagccttgattagccgctacaagatcgtaaagagcgaaaccgggcggccggagtacatcgagatcgagctagctgattggatgtaccgcgagatcacagaaggcaagaacccggacgtgctgacggttcaccccgattactttttgatcgatcccggcatcggccgttttctctaccgcctggcacgccgcgccgcaggcaaggcagaagccagatggttgttcaagacgatctacgaacgcagtggcagcgccggagagttcaagaagttctgtttcaccgtgcgcaagctgatcgggtcaaatgacctgccggagtacgatttgaaggaggaggcggggcaggctggcccgatcctagtcatgcgctaccgcaacctgatcgagggcgaagcatccgccggttcctaatgtacggagcagatgctagggcaaattgccctagcaggggaaaaaggtcgaaaaggtctctttcctgtggatagcacgtacattgggaacccaaagccgtacattgggaaccggaacccgtacattgggaacccaaagccgtacattgggaaccggtcacacatgtaagtgactgatataaaagagaaaaaaggcgatttttccgcctaaaactctttaaaacttattaaaactcttaaaacccgcctggcctgtgcatatgctagtcatgccccgcg

SEQ ID NO: 159 - DNA, 19324 bp, synthetic construct
  misc_feature 1..19324: note = pWISE3098 Full Plasmid Sequence
  source 1..19324: mol_type = other DNA
agcttactagtcaacaattggccaatctttgttctaaattgctaataaacgaccatttccgtcaattctccttggttgcaacagtctacccgtcaaatgtttactaatttataagtgtgaagtttgaattatgaaagacgaaatcgtattaaaaattcacaagaataaacaactccatagattttcaaaaaaacagtcacgagaaaaaaaccacagtccgtttgtctgctcttctagtttttattatttttctattaatagttttttgttatttcgagaataaaatttgaacgatgtccgaaccacaaaagccgagccgataaatcctaagccgagcctaactttagccgtaaccatcagtcacggctcccgggctaattcatttgaaccgaatcataatcaacggtttagatcaaactcaaaacaatctaacggcaacatagacgcgtcggtgagctaaaaagagtgtgaaagccaggtcaccatagcattgtctctcccagattttttatttgggaaataatagaagaaatagaaaaaaataaaagagtgagaaaaatcgtagagctatatattcgcacatgtactcgtttcgctttccttagtgttagctgctgccgctgttgtttctcctccatttctctatctttctctctcgctgcttctcgaatcttctgtatcatcttcttcttcttcaaggtgagtctctagatccgttcgcttgattttgctgctcgttagtcgttattgttgattctctatgccgatttcgctagatctgtttagcatgcgttgtggttttatgagaaaatctttgttttgggggttgcttgttatgtgattcgatccgtgcttgttggatcgatctgagctaattcttaaggtttatgtgttagatctatggagtttgaggattcttctcgcttctgtcgatctctcgctgttatttttgtttttttcagtgaagtgaagttgtttagttcgaaatgacttcgtgtatgctcgattgatctggttttaatcttcgatctgttaggtgttgatgtttacaagtgaattctagtgttttctcgttgagatctgtgaagtttgaacctagttttctcaataatcaacatatgaagcgatgtttgagtttcaataaacgctgctaatcttcgaaactaagttgtgatctgattcgtgtttacttcatgagcttatccaattcatttcggtttcattttactttttttttagtgaaccatggcgcaagttagcagaatctgcaatggtgtgcagaacccatctcttatctccaatctctcgaaatccagtcaacgcaaatctcccttatcggtttctctgaagacgcagcagcatccacgagcttatccgatttcgtcgtcgtggggattgaagaagagtgggatgacgttaattggctctgagcttcgtcctcttaaggtcatgtcttctgtttccacggcgtgcatgggggaagcggtgatcgccgaagtatcgactcaactatcagaggtagttggcgtcatcgagcgccatctcgaaccgacgttgctggccgtacatttgtacggctccgcagtggatggcggcctgaagccacacagtgatattgatttgctggttacggtgaccgtaaggcttgatgaaacaacgcggcgagctttgatcaacgaccttttggaaacttcggcttcccctggagagagcgagattctccgcgctgtagaagtcaccattgttgtgcacgacgacatcattccgtggcgttatccagctaagcgcgaactgcaatttggagaatggcagcgcaatgacattcttgcaggtatcttcgagccagccacgatcgacattgatctggctatcttgctgacaaaagcaagagaacatagcgttgccttggtaggtccagcggcggaggaactctttgatccggttcctgaacaggatctatttgaggcgctaaatgaaaccttaacgctatggaactcgccgcccgactgggctggcgatgagcgaaatgtagtgcttacgttgtcccgcatttggtacagcgcagtaaccggcaaaatcgcgccgaaggatgtcgctgccgactgggcaatggagcgcctgccggcccagtatcagcccgtcatacttgaagctagacaggcttatcttggacaagaagaagatcgcttggcctcgcgcgcagatcagttggaagaatttgtccactacgtgaaaggcgagatcaccaaggtagtcggcaaataaggatcaattcccgatcgttcaaacatttggcaataaagtttcttaagattgaatcctgttgccggtcttgcgatgattatcatataatttctgttgaattacgttaagcatgtaataattaacatgtaatgcatgacgttatttatgagatgggtttttatgattagagtcccgcaattatacatttaatacgcgatagaaaacaaaatatagcgcgcaaactaggataaattatcgcgcgcggtgtcatctatgttactagatcggtacctacgcgtagctagcccgtgaagtttctcatctaagcccccatttggacgtgaatgtagacacgtcgaaataaagatttccgaattagaataatttgtttattgctttcgcctataaatacgacggatcgtaatttgtcgttttatcaaaatgtactttcattttataataacgctgcggacatctacatttttgaattgaaaaaaaattggtaattactctttctttttctccatattgaccatcatactcattgctgatccatgtagatttcccggacatgaagccatttacaattgaatatatcctgccgccgctgccgctttgcacccggtggagcttgcatgttggtttctacgcagaactgagccggttaggcagataatttccattgagaactgagccatgtgcaccttccccccaacacggtgagcgacggggcaacggagtgatccacatgggacttttcctagcttggctgccatttttggggtgaggccgttcgcggccgaggggcgcagcccctggggggatgggaggcccgcgttagcgggccgggagggttcgagaagggggggcaccccccttcggcgtgcgcggtcacgcgcacagggcgcagccctggttaaaaacaaggtttataaatattggtttaaaagcaggttaaaagacaggttagcggtggccgaaaaacgggcggaaacccttgcaaatgctggattttctgcctgtggacagcccctcaaatgtcaataggtgcgcccctcatctgtcagcactctgcccctcaagtgtcaaggatcgcgcccctcatctgtcagtagtcgcgcccctcaagtgtcaataccgcagggcacttatccccaggcttgtccacatcatctgtgggaaactcgcgtaaaatcaggcgttttcgccgatttgcgaggctggccagctccacgtcgccggccgaaatcgagcctgcccctcatctgtcaacgccgcgccgggtgagtcggcccctcaagtgtcaacgtccgcccctcatctgtcagtgagggccaagttttccgcgaggtatccacaacgccggcggccggccgcggtgtctcgcacacggcttcgacggcgtttctggcgcgtttgcagggccatagacggccgccagcccagcggcgagggcaaccagcccggtgagcgtcggaaagggtcgatcgaccgatgcccttgagagccttcaacccagtcagctccttccggtgggcgcggggcatgactatcgtcgccgcacttatgactgtcttctttatcatgcaactcgtaggacaggtgccggcagcgctctgggtcattttcggcgaggaccgctttcgctggagcgcgacgatgatcggcctgtcgcttgcggtattcggaatcttgcacgccctcgctcaagccttcgtcactggtcccgccaccaaacgtttcggcgagaagcaggccattatcgccggcatggcggccgacgcgctgggctacgtcttgctggcgttcgcgacgcgaggctggatggccttccccattatgattcttctcgcttccggcggcatcgggatgcccgcgttgcaggccatgctgtccaggcaggtagatgacgaccatcagggacagcttcaaggatcgctcgcggctcttaccagcctaacttcgatcattggaccgctgatcgtcacggcgatttatgccgcctcggcgagcacatggaacgggttggcatggattgtaggcgccgccctataccttgtctgcctccccgcgttgcgtcgcggtgcatggagccgggccacctcgacctgaatggaagccggcggcacctcgctaacggattcaccactccaagaattggagccaatcaattcttgcggagaactgtgaatgcgcaaaccaacccttggcagaacatatccatcgcgtccgccatctccagcagccgcacgcggcgcatctcgggcagcgttgggtcctggccacgggtgcgcatgatcgtgctcctgtcgttgaggacccggctaggctggcggggttgccttactggttagcagaatgaatcaccgatacgcgagcgaacgtgaagcgactgctgctgcaaaacgtctgcgacctgagcaacaacatgaatggtcttcggtttccgtgtttcgtaaagtctggaaacgcggaagtcagcgccctgcaccattatgttccggatctgcatcgcaggatgctgctggctaccctgtggaacacctacatctgtattaacgaagcgctggcattgaccctgagtgatttttctctggtcccgccgcatccataccgccagttgtttaccctcacaacgttccagtaaccgggcatgttcatcatcagtaacccgtatcgtgagcatcctctctcgtttcatcggtatcattacccccatgaacagaaatcccccttacacggaggcatcagtgaccaaacaggaaaaaaccgcccttaacatggcccgctttatcagaagccagacattaacgcttctggagaaactcaacgagctggacgcggatgaacaggcagacatctgtgaatcgcttcacgaccacgctgatgagctttaccgcagctgcctcgcgcgtttcggtgatgacggtgaaaacctctgacacatgcagctcccggagacggtcacagcttgtctgtaagcggatgccgggagcagacaagcccgtcagggcgcgtcagcgggtgttggcgggtgtcggggcgcagccatgacccagtcacgtagcgatagcggagtgtatactggcttaactatgcggcatcagagcagattgtactgagagtgcaccatatgcggtgtgaaataccgcacagatgcgtaaggagaaaataccgcatcaggcgctcttccgcttcctcgctcactgactcgctgcgctcggtcgttcggctgcggcgagcggtatcagctcactcaaaggcggtaatacggttatccacagaatcaggggataacgcaggaaagaacatgtgagcaaaaggccagcaaaaggccaggaaccgtaaaaaggccgcgttgctggcgtttttccataggctccgcccccctgacgagcatcacaaaaatcgacgctcaagtcagaggtggcgaaacccgacaggactataaagataccaggcgtttccccctggaagctccctcgtgcgctctcctgttccgaccctgccgcttaccggatacctgtccgcctttctcccttcgggaagcgtggcgctttctcatagctcacgctgtaggtatctcagttcggtgtaggtcgttcgctccaagctgggctgtgtgcacgaaccccccgttcagcccgaccgctgcgccttatccggtaactatcgtcttgagtccaacccggtaagacacgacttatcgccactggcagcagccactggtaacaggattagcagagcgaggtatgtaggcggtgctacagagttcttgaagtggtggcctaactacggctacactagaaggacagtatttggtatctgcgctctgctgaagccagttaccttcggaaaaagagttggtagctcttgatccggcaaacaaaccaccgctggtagcggtggtttttttgtttgcaagcagcagattacgcgcagaaaaaaaggatctcaagaagatcctttgatcttttctacggggtctgacgctcagtggaacgaaaactcacgttaagggattttggtcatgagattatcaaaaaggatcttcacctagatccttttaaattaaaaatgaagttttaaatcaatctaaagtatatatgagtaaacttggtctgacagttaccaatgcttaatcagtgaggcacctatctcagcgatctgtctatttcgttcatccatagttgcctgactccccgtcgtgtagataactacgatacgggagggcttaccatctggccccagtgctgcaatgataccgcgagacccacgctcaccggctccagatttatcagcaataaaccagccagccggaagggccgagcgcagaagtggtcctgcaactttatccgcctccatccagtctattaattgttgccgggaagctagagtaagtagttcgccagttaatagtttgcgcaacgttgttgccattgctgcaggtcgggagcacaggatgacgcctaacaattcattcaagccgacaccgcttcgcggcgcggcttaattcaggagttaaacatcatgagggaagcggtgatcgccgaagtatcgactcaactatcagaggtagttggcgtcatcgagcgccatctcgaaccgacgttgctggccgtacatttgtacggctccgcagtggatggcggcctgaagccacacagtgatattgatttgctggttacggtgaccgtaaggcttgatgaaacaacgcggcgagctttgatcaacgaccttttggaaacttcggcttcccctggagagagcgagattctccgcgctgtagaagtcaccattgttgtgcacgacgacatcattccgtggcgttatccagctaagcgcgaactgcaatttggagaatggcagcgcaatgacattcttgcaggtatcttcgagccagccacgatcgacattgatctggctatcttgctgacaaaagcaagagaacatagcgttgccttggtaggtccagcggcggaggaactctttgatccggttcctgaacaggatctatttgaggcgctaaatgaaaccttaacgctatggaactcgccgcccgactgggctggcgatgagcgaaatgtagtgcttacgttgtcccgcatttggtacagcgcagtaaccggcaaaatcgcgccgaaggatgtcgctgccgactgggcaatggagcgcctgccggcccagtatcagcccgtcatacttgaagctaggcaggcttatcttggacaagaagatcgcttggcctcgcgcgcagatcagttggaagaatttgttcactacgtgaaaggcgagatcaccaaggtagtcggcaaataatgtctaacaattcgttcaagccgacgccgcttcgcggcgcggcttaactcaagcgttagatgctgcaggcatcgtggtgtcacgctcgtcgtttggtatggcttcattcagctccggttcccaacgatcaaggcgagttacatgatcccccatgttgtgcaaaaaagcggttagctccttcggtcctccgatcgaggatttttcggcgctgcgctacgtccgcgaccgcgttgagggatcaagccacagcagcccactcgaccttctagccgacccagacgagccaagggatctttttggaatgctgctccgtcgtcaggctttccgacgtttgggtggttgaacagaagtcattatcgcacggaatgccaagcactcccgaggggaaccctgtggttggcatgcacatacaaatggacgaacggataaaccttttcacgcccttttaaatatccgattattctaataaacgctcttttctcttaggtttacccgccaatatatcctgtcaaacactgatagtttaaactgaaggcgggaaacgacaatctggcgcgccactgttaataatttttaaacgtcagcgcactaaaaaaacgaaaagacggacacgtgaaaataaaaaacacacactagtttatgacgcaatactattttacttatgatttgggtacattagacaaaaccgtgaaagagatgtatcagctatgaaacctgtatacttcaatacagagacttactcatatcggatacgtacgcacgaagtatcatattaattattttaatttttaataaatattttatcggatacttatgtgatactctacatatacacaaggatatttctaagatactttatagatacgtatcctagaaaaacatgaagagtaaaaaagtgagacaatgttgtaaaaattcattataaatgtatatgattcaattttagatatgcatcagtataattgattctcgatgaaacacttaaaattatatttcttgtggaagaacgtagcgagagaggtgattcagttagacaacattaaataaaattaatgttaagttcttttaatgatgtttctctcaatatcacatcatatgaaaatgtaatatgatttataagaaaatttttaaaaaatttattttaataatcacatgtactattttttaaaaattgtatcttttataataatacaataataaagagtaatcagtgttaatttttcttcaaatataagttttattataaatcattgttaacgtatcataagtcattaccgtatcgtatcttaatttttttttaaaaaccgctaattcacgtacccgtattgtattgtacccgcacctgtatcacaatcgatcttagttagaagaattgtctcgaggcggtgcaagacagcatataatagacgtggactctcttataccaaacgttgtcgtatcacaaagggttaggtaacaagtcacagtttgtccacgtgtcacgttttaattggaagaggtgccgttggcgtaatataacagccaatcgatttttgctataaaagcaaatcaggtaaactaaacttcttcattcttttcttccccatcgctacaaaaccggttcctttggaaaagagattcattcaaacctagcacccaattccgtttcaaggtataatctactttctattcttcgattattttattattattagctactatcgtttaatcgatcttttcttttgatccgtcaaatttaaattcaattagggttttgttcttttctttcatctgattgaaatccttctgaattgaaccgtttacttgattttactgtttattgtatgatttaatcctttgtttttcaaagacagtctttagattgtgattaggggttcatataaatttttagatttggatttttgtattgtatgattcaaaaaatacgtcctttaattagattagtacatggatattttttacccgatttattgattgtcagggagaatttgatgagcaagtttttttgatgtctgttgtaaattgaattgattataattgctgatctgctgcttccagttttcataacccatattcttttaaccttgttgtacacacaatgaaaaattggtgattgattcatttgtttttctttgttttggattatacagggtatggcgtccaagctggagaagtttacaaactgttacagcctctccaaaaccctcaggtttaaagcgatcccggtgggcaagacccaggagaacatcgacaacaagaggctcctggtggaagacgagaagcgcgccgaagactacaagggcgtgaagaagctgctcgataggtactacctcagctttattaacgacgtgctgcacagcatcaaactcaagaatctcaacaactacatctccctcttccgcaaaaagacccgcaccgagaaggagaacaaggagctggagaacctggagatcaacctccgcaaggaaatcgccaaagcgttcaagggcaatgaagggtacaagagcctcttcaagaaagacatcatcgaaactatcctcccagagtttctcgatgacaaggacgagatcgcgctggtgaactcctttaacgggttcacaaccgcgtttaccggcttctttgataacagggaaaatatgttctccgaggaggccaagtccaccagcatcgccttcaggtgtatcaacgagaacctcacccgctacatttccaatatggacattttcgagaaggtggatgcgatcttcgataagcacgaggtgcaggagatcaaagagaagattctcaattccgattatgacgtcgaggatttcttcgaaggggagttctttaattttgtgctcacacaagagggcattgacgtgtacaacgcgattatcgggggcttcgtcacagagtccggggagaagattaaggggctgaatgagtacatcaatctgtacaatcagaagaccaagcagaaactgccgaaattcaagccgctctacaagcaagtcctgtccgatagggaaagcctctccttctacggcgagggctataccagcgacgaggaggtgctggaagtcttccgcaacacactgaataagaatagcgagattttctcctccatcaagaagctcgagaagctctttaagaactttgacgagtacagctccgccgggattttcgtgaagaacgggccggcgatcagcaccatctccaaggacatctttggcgagtggaacgtcatcagggacaagtggaacgccgagtacgacgacatccacctgaagaagaaggcggtggtgaccgagaagtatgaggacgatcgcaggaagtccttcaaaaaaatcggctccttcagcctcgaacagctccaggagtatgccgatgcggatctgtccgtcgtcgagaagctgaaggaaatcatcattcagaaggtcgacgagatctataaagtgtacgggtccagcgagaagctgttcgacgccgactttgtgctcgagaagtccctcaaaaagaatgacgccgtggtggccattatgaaagacctgctcgactccgtgaagtccttcgaaaattacattaaagcgttctttggggaggggaaggaaactaacagggatgagtccttctatggcgactttgtcctcgcgtacgacatcctgctgaaggtcgaccacatttacgacgcgatccgcaactacgtgacacagaagccgtactccaaagacaagttcaagctgtacttccagaacccgcaatttatggggggctgggacaaggataaagagacagactaccgcgcgacaattctccgctatggctccaaatactatctggccatcatggacaagaagtacgcgaagtgcctgcagaagatcgacaaagacgacgtcaatggcaactatgaaaagatcaactacaagctgctgccgggtccgaacaagatgctcccgaaggtgttcttcagcaagaagtggatggcctactacaatccaagcgaggatattcagaaaatctataaaaacgggaccttcaagaagggggacatgtttaacctcaacgactgccacaagctcattgatttcttcaaggatagcatttcccgctacccgaaatggtccaatgcgtacgattttaacttctccgagacagaaaagtacaaagacatcgcgggcttttacagggaggtggaggagcaagggtataaagtttcttttgaatccgcgagcaagaaggaagtcgacaagctcgtcgaggagggcaagctctacatgttccaaatttataacaaggacttttccgacaagagccatgggaccccaaacctccacaccatgtacttcaaactgctctttgacgagaacaaccacgggcaaatcaggctgagcggcggcgccgaattattcatgcgcagggcctccctcaagaaggaagagctggtcgtccatccagccaattccccgatcgcgaacaagaacccggacaatccgaaaaagaccaccaccctgtcctacgacgtctacaaggacaaacgcttcagcgaagaccagtacgaattacacatcccaattgcgattaataagtgcccaaagaatatcttcaaaattaatacagaggtcagggtgctgctcaaacacgacgacaatccgtatgtcatcggcattgacaggggcgagcgcaatctgctctatatcgtggtcgtggatgggaagggcaatattgtggagcagtactccctgaacgagattatcaacaacttcaatgggattaggattaagaccgactatcacagcctgctcgacaagaaagaaaaagagaggtttgaggcccgccaaaactggacctccattgagaatatcaaagaattaaaggccggctatatttcccaagtcgtccacaagatctgcgagctggtggagaaatatgacgccgtgattgcgctcgaagacttaaattctgggttcaagaactcccgcgtgaaggtggaaaaacaggtgtatcagaaattcgagaaaatgctgatcgacaaactcaattatatggtggataagaagtccaacccgtgtgccacagggggcgcgctgaagggctatcagatcaccaacaagttcgagagcttcaagagcatgagcacccagaacgggtttattttctacatcccggcgtggctcacctccaagattgacccgagcaccggcttcgtgaacctcctgaagacaaagtatacctccattgccgacagcaagaagtttatctcctccttcgaccgcattatgtatgtgccggaggaggacctcttcgagttcgccctcgactacaaaaacttcagccgcacagatgcggattacatcaagaagtggaagctgtactcctacgggaacaggatccgcatcttcaggaatccaaaaaaaaataacgtctttgactgggaggaagtgtgcctgacatccgcctacaaggaactgttcaataaatacggcatcaattaccagcagggcgacattcgcgccctcctctgtgagcagtccgacaaagcgttttactccagcttcatggccctcatgtccctgatgctccaaatgaggaatagcatcacagggcgcaccgacgtcgacttcctcatcagcccggtgaagaactccgacgggatcttttacgactcccgcaactatgaggcgcaagagaatgcgatcctcccgaagaacgccgatgcgaacggggcctataatatcgccaggaaagtgctctgggccatcgggcagttcaaaaaggcggaggatgagaagctcgacaaggtgaaaattgccatttccaacaaggagtggctggagtacgcgcagacctccgtgaagcacggctcctccgagacaccaggcacctccgagagcgcgacgcccgagggcggctccggcggctccggcagcgaggaactgctgtccaagaactatcacctggagaacgaggttgcaagactgaagaagggatctggctcaggaggctctggcagcggtgggtccggttcagggtctggaggcagcggttccggtgggtcaggatctggtgaggaactgctgtctaagaactaccatctggagaacgaggttgctaggctgaagaagggtagcgggtccggaggctcaggatctggtgggagcggatctggctcaggaggctctggcagcggtgggtccggttcaggtgaagagttgctgagcaagaactaccacctggagaacgaggtagccagactgaagaagggatctggcagcggaggctccggatcaggtgggtctggtagcgggtccggaggctcaggctctggtgggagcggatctggtgaagagttgttgtccaagaactaccatctggagaacgaggtagcaaggctgaagaagggttcagggtctggaggcagcggatctggaggatctggatctggcagcggaggctccggctcaggtgggtctggtagcggcgaagagttgttgtctaagaactaccacctggagaacgaggtcgcgagactgaagaagggatctggctcaggaggctctggaagcggtgggtccggttcagggtctggaggcagcggctccggtgggtcaggatctggagaagagcttttgagcaagaactaccatctggagaacgaggtcgccaggctgaagaagggtagcgggtccggaggctcaggatctggtgggagcggatctggctcaggaggctctggcagcggtgggtccggttcaggcgaagagttgctttctaagaactaccacctggagaacgaggtagcgagactgaagaagggatctggcagcggaggctccggatcaggtgggtctggtagcgggtccggaggctcaggctctggtgggagcggatctggagaagagctgctgtctaagaactatcatctggagaatgaggttgcaaggctgaagaagtgaaagggctctctgtcatgatttcatactttcattattgagctctgtaattacaattatgaccatgagaacatctcttattgtgtggccttttaattgctgatgttagtactgaaccaaagcttatcgtgatgatgtaaaagcaataagtacttgtttgtagcttctttgtgtctccctttgggcttaatacatctgtttagtgttgtggctttggcatagacttctcttggtaataatgccttgcaatgcaaaatttcaattatcaaattctattatgttctcaccttatggtaacagcttaccctgtggaagatgagattcttgagttgagtcattgccaatttttggcattagcttttgaattagtgaattttgacaaaaattaccgtgacactgattttgttgaagctcttaagtgtagtttttacaaaatttcagtggctcgttgtgattatgtcaaactcacggcgaatgtagttcttacagaatttcagtggctccctgcaggatcccaatggcgcgcctagctaactagctagccacgtgactcgcagaacgttgtgtggcgagacggaaagaaagtcacgcctccaaagagtgcagcatctcttctggctctcacggtcctctgtggatccatcgatatcgaattcctgcaggctcgaggtcattcatatgcttgagaagagagtcgggatagtccaaaataaaacaaaggtaagattacctggtcaaaagtgaaaacatcagttaaaaggtggtataaagtaaaatatcggtaataaaaggtggcccaaagtgaaatttactcttttctactattataaaaattgaggatgtttttgtcggtactttgatacgtcatttttgtatgaattggtttttaagtttattcgcttttggaaatgcatatctgtatttgagtcgggttttaagttcgtttgcttttgtaaatacagagggatttgtataagaaatatctttagaaaaacccatatgctaatttgacataatttttgagaaaaatatatattcaggcgaattctcacaatgaacaataataagattaaaatagctttcccccgttgcagcgcatgggtattttttctagtaaaaataaaagataaacttagactcaaaacatttacaaaaacaacccctaaagttcctaaagcccaaagtgctatccacgatccatagcaagcccagcccaacccaacccaacccaacccaccccagtccagccaactggacaatagtctccacacccccccactatcaccgtgagttgtccgcacgcaccgcacgtctcgcagccaaaaaaaaaaagaaagaaaaaaaagaaaaagaaaaaacagcaggtgggtccgggtcgtgggggccggaaacgcgaggaggatcgcgagccagcgacgaggagcttaggcctcatcgttgaagatgcctctgccgacagtggtcccaaagatggacccccacccacgaggagcatcgtggaaaaagaagacgttccaaccacgtcttcaaagcaagtggattgatgtgatatctccactgacgtaagggatgacgcacaatcccactatccttcgaggcctcatcgttgaagatgcctctgccgacagtggtcccaaagatggacccccacccacgaggagcatcgtggaaaaagaagacgttccaaccacgtcttcaaagcaagtggattgatgtgatatctccactgacgtaagggatgacgcacaatcccactatccttcgaagctccctccctccgcttccaaagaaacgccccccatcgccactatatacatacccccccctctcctcccatccccccaacccttctagaaccatcttccacacactcaagccacactattggagaacacacagggacaacacaccataagatccaagggaggcctccgccgccgccggtaaccaccccgcccctctcctctttctttctccgtttttttttccgtctcggtctcgatctttggccttggtagtttgggtgggcgagaggcggcttcgtgcgcgcccagatcggtgcgcgggaggggcgggatctcgcggctggggctctcgccggcgtggatccggcccggatctcgcggggaatggggctctcggatgtagatctgcgatccgccgttgttgggggagatgatggggggtttaaaatttccgccgtgctaaacaagatcaggaagaggggaaaagggcactatggtttatatttttatatatttctgctgcttcgtcaggcttagatgtgctagatctttctttcttctttttgtgggtagaatttgaatccctcagcattgttcatcggtagtttttcttttcatgatttgtgacaaatgcagcctcgtgcggagcttttttgtaggtagaaggcggccgcatggcccagtctaagcacgggttgacgaaggagatgactatgaagtatcgcatggaaggctgcgttgacggccacaaattcgtcattaccggcgagggcatcggctacccctttaaggtaagtttctgcttctacctttgatatatatataataattatcattaattagtagtaatataatatttcaaatatttttttcaaaataaaagaatgtagtatatagcaattgcttttctgtagtttataagtgtgtatattttaatttataacttttctaatatatgaccaaaatttgttgatgtgcagggcaagcaagcgataaacctgtgcgtggtggagggtggccctctgcccttcgccgaggatatactctcagccgccttcatgtacgggaatcgggtgttcacggagtacccgcaagacatcgtggactacttcaagaactcctgccccgccggatacacatgggaccgttccttcctcttcgaggacggagccgtttgcatctgcaacgcggacatcaccgtgtccgtcgaggagaactgcatgtaccacgagtcaaagttctatggagtgaacttcccggccgatggtcccgtgatgaagaaaatgacggacaactgggagccgtcgtgcgagaaaatcattcccgtcccaaaacagggaatcctcaagggcgacgtgtcgatgtacctacttctcaaggacggtggacggctacggtgccagttcgacactgtttacaaggcgaagtcggtgccgaggaagatgccggactggcactttatccagcacaagctgacaagggaggacagaagcgacgctaagaaccagaaatggcacctcaccgagcacgccatcgccagtggctctgcgctgcccgggtgaccctgcaatgtgaccctagacttgtccatcttctggattggccaacttaattaatgtatgaaataaaaggatgcacacatagtgacatgctaatcactataatgtgggcatcaaagttgtgtgttatgtgtaattactaattatctgaataagagaaagagatcatccatatttcttatcctaaatgaatgtcacgtgtctttataattctttgatgaaccagatgcattttattaaccaattccatatacatataaatattaatcatatataattaatatcaattgggttagcaaaacaaatctagtctaggtgtgttttgctaattattgggggatagtgcaaaaagaaatctacgttctcaataattcagatagaaaacttaataaagtgagataatttacatagattgcttttatcctttgatatatgtgaaaccatgcatgatataaggaaaatagatagagaaataattttttacatcgttgaatatgtaaacaatttaattcaagaagctaggaatataaatattgaggagtttatgattattattattattttgatgttcaatgaagttttttttaatttcatatgaagtatacaaaaattcttcatagatttttgtttctatgccgtagttatctttaatatatttgtggttgaagaaatttattgctagaaacgaatggattgtcaatttttttttaaagcaaatatatatgaaattatactgtatattattttagtcatgattaaaatgtggccttaattgaatcatctttctcattcattttttcaaaagcatatcaggatgattgatatttatctattttaaaaattaatttaagggttcaaattaaatttaacttaaaagtgtcctaaccgtagttaaaggtttactttaaaaaaatactatgaaaaatctaatcttctatgaatcgagggcccggccgtgacggccacgagcgaactcctgcaggcgataaaaatgttttaaacgatatatattataaaaaaaaacgtttcaaaaataaatacaaaaatgtttttaaatatatataatttaactcattaaagaaaataaaaatgcaagtgcggtgacaagacaagctaaaagttgcaaaagaaatggcagggctataaggctcacctactcctggatttaccaaattttggttcgtccctatactcgaaaaataaaacaaaataaatttcagtatcttcgtttttgtatgctttgactgtgaggcgaggccaactttcttcttctgtctgagatgaattttgtttgcctcctgtgaaggatgtatcattcaaagtgaatgttttgcaactgccagtagtcccacatcgaccaaatattcttattacagtgtgtttatatagcacctggagaaggaatgggttgtttcaaagattaaataatttctactaagtgtagattgccgttaatttgagagtccaagtaatttctactaagtgtagatttttttttgcggccgcacaacaaacgcgccggcga

SEQ ID NO: 160 - DNA, 19324 bp, synthetic construct
  misc_feature 1..19324: note = pWISE3093 Full Plasmid Sequence
  source 1..19324: mol_type = other DNA
agcttactagtcaacaattggccaatctttgttctaaattgctaataaacgaccatttccgtcaattctccttggttgcaacagtctacccgtcaaatgtttactaatttataagtgtgaagtttgaattatgaaagacgaaatcgtattaaaaattcacaagaataaacaactccatagattttcaaaaaaacagtcacgagaaaaaaaccacagtccgtttgtctgctcttctagtttttattatttttctattaatagttttttgttatttcgagaataaaatttgaacgatgtccgaaccacaaaagccgagccgataaatcctaagccgagcctaactttagccgtaaccatcagtcacggctcccgggctaattcatttgaaccgaatcataatcaacggtttagatcaaactcaaaacaatctaacggcaacatagacgcgtcggtgagctaaaaagagtgtgaaagccaggtcaccatagcattgtctctcccagattttttatttgggaaataatagaagaaatagaaaaaaataaaagagtgagaaaaatcgtagagctatatattcgcacatgtactcgtttcgctttccttagtgttagctgctgccgctgttgtttctcctccatttctctatctttctctctcgctgcttctcgaatcttctgtatcatcttcttcttcttcaaggtgagtctctagatccgttcgcttgattttgctgctcgttagtcgttattgttgattctctatgccgatttcgctagatctgtttagcatgcgttgtggttttatgagaaaatctttgttttgggggttgcttgttatgtgattcgatccgtgcttgttggatcgatctgagctaattcttaaggtttatgtgttagatctatggagtttgaggattcttctcgcttctgtcgatctctcgctgttatttttgtttttttcagtgaagtgaagttgtttagttcgaaatgacttcgtgtatgctcgattgatctggttttaatcttcgatctgttaggtgttgatgtttacaagtgaattctagtgttttctcgttgagatctgtgaagtttgaacctagttttctcaataatcaacatatgaagcgatgtttgagtttcaataaacgctgctaatcttcgaaactaagttgtgatctgattcgtgtttacttcatgagcttatccaattcatttcggtttcattttactttttttttagtgaaccatggcgcaagttagcagaatctgcaatggtgtgcagaacccatctcttatctccaatctctcgaaatccagtcaacgcaaatctcccttatcggtttctctgaagacgcagcagcatccacgagcttatccgatttcgtcgtcgtggggattgaagaagagtgggatgacgttaattggctctgagcttcgtcctcttaaggtcatgtcttctgtttccacggcgtgcatgggggaagcggtgatcgccgaagtatcgactcaactatcagaggtagttggcgtcatcgagcgccatctcgaaccgacgttgctggccgtacatttgtacggctccgcagtggatggcggcctgaagccacacagtgatattgatttgctggttacggtgaccgtaaggcttgatgaaacaacgcggcgagctttgatcaacgaccttttggaaacttcggcttcccctggagagagcgagattctccgcgctgtagaagtcaccattgttgtgcacgacgacatcattccgtggcgttatccagctaagcgcgaactgcaatttggagaatggcagcgcaatgacattcttgcaggtatcttcgagccagccacgatcgacattgatctggctatcttgctgacaaaagcaagagaacatagcgttgccttggtaggtccagcggcggaggaactctttgatccggttcctgaacaggatctatttgaggcgctaaatgaaaccttaacgctatggaactcgccgcccgactgggctggcgatgagcgaaatgtagtgcttacgttgtcccgcatttggtacagcgcagtaaccggcaaaatcgcgccgaaggatgtcgctgccgactgggcaatggagcgcctgccggcccagtatcagcccgtcatacttgaagctagacaggcttatcttggacaagaagaagatcgcttggcctcgcgcgcagatcagttggaagaatttgtccactacgtgaaaggcgagatcaccaaggtagtcggcaaataaggatcaattcccgatcgttcaaacatttggcaataaagtttcttaagattgaatcctgttgccggtcttgcgatgattatcatataatttctgttgaattacgttaagcatgtaataattaacatgtaatgcatgacgttatttatgagatgggtttttatgattagagtcccgcaattatacatttaatacgcgatagaaaacaaaatatagcgcgcaaactaggataaattatcgcgcgcggtgtcatctatgttactagatcggtacctacgcgtagctagcccgtgaagtttctcatctaagcccccatttggacgtgaatgtagacacgtcgaaataaagatttccgaattagaataatttgtttattgctttcgcctataaatacgacggatcgtaatttgtcgttttatcaaaatgtactttcattttataataacgctgcggacatctacatttttgaattgaaaaaaaattggtaattactctttctttttctccatattgaccatcatactcattgctgatccatgtagatttcccggacatgaagccatttacaattgaatatatcctgccgccgctgccgctttgcacccggtggagcttgcatgttggtttctacgcagaactgagccggttaggcagataatttccattgagaactgagccatgtgcaccttccccccaacacggtgagcgacggggcaacggagtgatccacatgggacttttcctagcttggctgccatttttggggtgaggccgttcgcggccgaggggcgcagcccctggggggatgggaggcccgcgttagcgggccgggagggttcgagaagggggggcaccccccttcggcgtgcgcggtcacgcgcacagggcgcagccctggttaaaaacaaggtttataaatattggtttaaaagcaggttaaaagacaggttagcggtggccgaaaaacgggcggaaacccttgcaaatgctggattttctgcctgtggacagcccctcaaatgtcaataggtgcgcccctcatctgtcagcactctgcccctcaagtgtcaaggatcgcgcccctcatctgtcagtagtcgcgcccctcaagtgtcaataccgcagggcacttatccccaggcttgtccacatcatctgtgggaaactcgcgtaaaatcaggcgttttcgccgatttgcgaggctggccagctccacgtcgccggccgaaatcgagcctgcccctcatctgtcaacgccgcgccgggtgagtcggcccctcaagtgtcaacgtccgcccctcatctgtcagtgagggccaagttttccgcgaggtatccacaacgccggcggccggccgcggtgtctcgcacacggcttcgacggcgtttctggcgcgtttgcagggccatagacggccgccagcccagcggcgagggcaaccagcccggtgagcgtcggaaagggtcgatcgaccgatgcccttgagagccttcaacccagtcagctccttccggtgggcgcggggcatgactatcgtcgccgcacttatgactgtcttctttatcatgcaactcgtaggacaggtgccggcagcgctctgggtcattttcggcgaggaccgctttcgctggagcgcgacgatgatcggcctgtcgcttgcggtattcggaatcttgcacgccctcgctcaagccttcgtcactggtcccgccaccaaacgtttcggcgagaagcaggccattatcgccggcatggcggccgacgcgctgggctacgtcttgctggcgttcgcgacgcgaggctggatggccttccccattatgattcttctcgcttccggcggcatcgggatgcccgcgttgcaggccatgctgtccaggcaggtagatgacgaccatcagggacagcttcaaggatcgctcgcggctcttaccagcctaacttcgatcattggaccgctgatcgtcacggcgatttatgccgcctcggcgagcacatggaacgggttggcatggattgtaggcgccgccctataccttgtctgcctccccgcgttgcgtcgcggtgcatggagccgggccacctcgacctgaatggaagccggcggcacctcgctaacggattcaccactccaagaattggagccaatcaattcttgcggagaactgtgaatgcgcaaaccaacccttggcagaacatatccatcgcgtccgccatctccagcagccgcacgcggcgcatctcgggcagcgttgggtcctggccacgggtgcgcatgatcgtgctcctgtcgttgaggacccggctaggctggcggggttgccttactggttagcagaatgaatcaccgatacgcgagcgaacgtgaagcgactgctgctgcaaaacgtctgcgacctgagcaacaacatgaatggtcttcggtttccgtgtttcgtaaagtctggaaacgcggaagtcagcgccctgcaccattatgttccggatctgcatcgcaggatgctgctggctaccctgtggaacacctacatctgtattaacgaagcgctggcattgaccctgagtgatttttctctggtcccgccgcatccataccgccagttgtttaccctcacaacgttccagtaaccgggcatgttcatcatcagtaacccgtatcgtgagcatcctctctcgtttcatcggtatcattacccccatgaacagaaatcccccttacacggaggcatcagtgaccaaacaggaaaaaaccgcccttaacatggcccgctttatcagaagccagacattaacgcttctggagaaactcaacgagctggacgcggatgaacaggcagacatctgtgaatcgcttcacgaccacgctgatgagctttaccgcagctgcctcgcgcgtttcggtgatgacggtgaaaacctctgacacatgcagctcccggagacggtcacagcttgtctgtaagcggatgccgggagcagacaagcccgtcagggcgcgtcagcgggtgttggcgggtgtcggggcgcagccatgacccagtcacgtagcgatagcggagtgtatactggcttaactatgcggcatcagagcagattgtactgagagtgcaccatatgcggtgtgaaataccgcacagatgcgtaaggagaaaataccgcatcaggcgctcttccgcttcctcgctcactgactcgctgcgctcggtcgttcggctgcggcgagcggtatcagctcactcaaaggcggtaatacggttatccacagaatcaggggataacgcaggaaagaacatgtgagcaaaaggccagcaaaaggccaggaaccgtaaaaaggccgcgttgctggcgtttttccataggctccgcccccctgacgagcatcacaaaaatcgacgctcaagtcagaggtggcgaaacccgacaggactataaagataccaggcgtttccccctggaagctccctcgtgcgctctcctgttccgaccctgccgcttaccggatacctgtccgcctttctcccttcgggaagcgtggcgctttctcatagctcacgctgtaggtatctcagttcggtgtaggtcgttcgctccaagctgggctgtgtgcacgaaccccccgttcagcccgaccgctgcgccttatccggtaactatcgtcttgagtccaacccggtaagacacgacttatcgccactggcagcagccactggtaacaggattagcagagcgaggtatgtaggcggtgctacagagttcttgaagtggtggcctaactacggctacactagaaggacagtatttggtatctgcgctctgctgaagccagttaccttcggaaaaagagttggtagctcttgatccggcaaacaaaccaccgctggtagcggtggtttttttgtttgcaagcagcagattacgcgcagaaaaaaaggatctcaagaagatcctttgatcttttctacggggtctgacgctcagtggaacgaaaactcacgttaagggattttggtcatgagattatcaaaaaggatcttcacctagatccttttaaattaaaaatgaagttttaaatcaatctaaagtatatatgagtaaacttggtctgacagttaccaatgcttaatcagtgaggcacctatctcagcgatctgtctatttcgttcatccatagttgcctgactccccgtcgtgtagataactacgatacgggagggcttaccatctggccccagtgctgcaatgataccgcgagacccacgctcaccggctccagatttatcagcaataaaccagccagccggaagggccgagcgcagaagtggtcctgcaactttatccgcctccatccagtctattaattgttgccgggaagctagagtaagtagttcgccagttaatagtttgcgcaacgttgttgccattgctgcaggtcgggagcacaggatgacgcctaacaattcattcaagccgacaccgcttcgcggcgcggcttaattcaggagttaaacatcatgagggaagcggtgatcgccgaagtatcgactcaactatcagaggtagttggcgtcatcgagcgccatctcgaaccgacgttgctggccgtacatttgtacggctccgcagtggatggcggcctgaagccacacagtgatattgatttgctggttacggtgaccgtaaggcttgatgaaacaacgcggcgagctttgatcaacgaccttttggaaacttcggcttcccctggagagagcgagattctccgcgctgtagaagtcaccattgttgtgcacgacgacatcattccgtggcgttatccagctaagcgcgaactgcaatttggagaatggcagcgcaatgacattcttgcaggtatcttcgagccagccacgatcgacattgatctggctatcttgctgacaaaagcaagagaacatagcgttgccttggtaggtccagcggcggaggaactctttgatccggttcctgaacaggatctatttgaggcgctaaatgaaaccttaacgctatggaactcgccgcccgactgggctggcgatgagcgaaatgtagtgcttacgttgtcccgcatttggtacagcgcagtaaccggcaaaatcgcgccgaaggatgtcgctgccgactgggcaatggagcgcctgccggcccagtatcagcccgtcatacttgaagctaggcaggcttatcttggacaagaagatcgcttggcctcgcgcgcagatcagttggaagaatttgttcactacgtgaaaggcgagatcaccaaggtagtcggcaaataatgtctaacaattcgttcaagccgacgccgcttcgcggcgcggcttaactcaagcgttagatgctgcaggcatcgtggtgtcacgctcgtcgtttggtatggcttcattcagctccggttcccaacgatcaaggcgagttacatgatcccccatgttgtgcaaaaaagcggttagctccttcggtcctccgatcgaggatttttcggcgctgcgctacgtccgcgaccgcgttgagggatcaagccacagcagcccactcgaccttctagccgacccagacgagccaagggatctttttggaatgctgctccgtcgtcaggctttccgacgtttgggtggttgaacagaagtcattatcgcacggaatgccaagcactcccgaggggaaccctgtggttggcatgcacatacaaatggacgaacggataaaccttttcacgcccttttaaatatccgattattctaataaacgctcttttctcttaggtttacccgccaatatatcctgtcaaacactgatagtttaaactgaaggcgggaaacgacaatctggcgcgccactgttaataatttttaaacgtcagcgcactaaaaaaacgaaaagacggacacgtgaaaataaaaaacacacactagtttatgacgcaatactattttacttatgatttgggtacattagacaaaaccgtgaaagagatgtatcagctatgaaacctgtatacttcaatacagagacttactcatatcggatacgtacgcacgaagtatcatattaattattttaatttttaataaatattttatcggatacttatgtgatactctacatatacacaaggatatttctaagatactttatagatacgtatcctagaaaaacatgaagagtaaaaaagtgagacaatgttgtaaaaattcattataaatgtatatgattcaattttagatatgcatcagtataattgattctcgatgaaacacttaaaattatatttcttgtggaagaacgtagcgagagaggtgattcagttagacaacattaaataaaattaatgttaagttcttttaatgatgtttctctcaatatcacatcatatgaaaatgtaatatgatttataagaaaatttttaaaaaatttattttaataatcacatgtactattttttaaaaattgtatcttttataataatacaataataaagagtaatcagtgttaatttttcttcaaatataagttttattataaatcattgttaacgtatcataagtcattaccgtatcgtatcttaatttttttttaaaaaccgctaattcacgtacccgtattgtattgtacccgcacctgtatcacaatcgatcttagttagaagaattgtctcgaggcggtgcaagacagcatataatagacgtggactctcttataccaaacgttgtcgtatcacaaagggttaggtaacaagtcacagtttgtccacgtgtcacgttttaattggaagaggtgccgttggcgtaatataacagccaatcgatttttgctataaaagcaaatcaggtaaactaaacttcttcattcttttcttccccatcgctacaaaaccggttcctttggaaaagagattcattcaaacctagcacccaattccgtttcaaggtataatctactttctattcttcgattattttattattattagctactatcgtttaatcgatcttttcttttgatccgtcaaatttaaattcaattagggttttgttcttttctttcatctgattgaaatccttctgaattgaaccgtttacttgattttactgtttattgtatgatttaatcctttgtttttcaaagacagtctttagattgtgattaggggttcatataaatttttagatttggatttttgtattgtatgattcaaaaaatacgtcctttaattagattagtacatggatattttttacccgatttattgattgtcagggagaatttgatgagcaagtttttttgatgtctgttgtaaattgaattgattataattgctgatctgctgcttccagttttcataacccatattcttttaaccttgttgtacacacaatgaaaaattggtgattgattcatttgtttttctttgttttggattatacagggtatggcggaggaactgctgtccaagaactatcacctggagaacgaggttgcaagactgaagaagggatctggctcaggaggctctggcagcggtgggtccggttcagggtctggaggcagcggttccggtgggtcaggatctggtgaggaactgctgtctaagaactaccatctggagaacgaggttgctaggctgaagaagggtagcgggtccggaggctcaggatctggtgggagcggatctggctcaggaggctctggcagcggtgggtccggttcaggtgaagagttgctgagcaagaactaccacctggagaacgaggtagccagactgaagaagggatctggcagcggaggctccggatcaggtgggtctggtagcgggtccggaggctcaggctctggtgggagcggatctggtgaagagttgttgtccaagaactaccatctggagaacgaggtagcaaggctgaagaagggttcagggtctggaggcagcggatctggaggatctggatctggcagcggaggctccggctcaggtgggtctggtagcggcgaagagttgttgtctaagaactaccacctggagaacgaggtcgcgagactgaagaagggatctggctcaggaggctctggaagcggtgggtccggttcagggtctggaggcagcggctccggtgggtcaggatctggagaagagcttttgagcaagaactaccatctggagaacgaggtcgccaggctgaagaagggtagcgggtccggaggctcaggatctggtgggagcggatctggctcaggaggctctggcagcggtgggtccggttcaggcgaagagttgctttctaagaactaccacctggagaacgaggtagcgagactgaagaagggatctggcagcggaggctccggatcaggtgggtctggtagcgggtccggaggctcaggctctggtgggagcggatctggagaagagctgctgtctaagaactatcatctggagaatgaggttgcaaggctgaagaagggctcctccgagacaccaggcacctccgagagcgcgacgcccgagggcggctccggcggctccggcagctccaagctggagaagtttacaaactgttacagcctctccaaaaccctcaggtttaaagcgatcccggtgggcaagacccaggagaacatcgacaacaagaggctcctggtggaagacgagaagcgcgccgaagactacaagggcgtgaagaagctgctcgataggtactacctcagctttattaacgacgtgctgcacagcatcaaactcaagaatctcaacaactacatctccctcttccgcaaaaagacccgcaccgagaaggagaacaaggagctggagaacctggagatcaacctccgcaaggaaatcgccaaagcgttcaagggcaatgaagggtacaagagcctcttcaagaaagacatcatcgaaactatcctcccagagtttctcgatgacaaggacgagatcgcgctggtgaactcctttaacgggttcacaaccgcgtttaccggcttctttgataacagggaaaatatgttctccgaggaggccaagtccaccagcatcgccttcaggtgtatcaacgagaacctcacccgctacatttccaatatggacattttcgagaaggtggatgcgatcttcgataagcacgaggtgcaggagatcaaagagaagattctcaattccgattatgacgtcgaggatttcttcgaaggggagttctttaattttgtgctcacacaagagggcattgacgtgtacaacgcgattatcgggggcttcgtcacagagtccggggagaagattaaggggctgaatgagtacatcaatctgtacaatcagaagaccaagcagaaactgccgaaattcaagccgctctacaagcaagtcctgtccgatagggaaagcctctccttctacggcgagggctataccagcgacgaggaggtgctggaagtcttccgcaacacactgaataagaatagcgagattttctcctccatcaagaagctcgagaagctctttaagaactttgacgagtacagctccgccgggattttcgtgaagaacgggccggcgatcagcaccatctccaaggacatctttggcgagtggaacgtcatcagggacaagtggaacgccgagtacgacgacatccacctgaagaagaaggcggtggtgaccgagaagtatgaggacgatcgcaggaagtccttcaaaaaaatcggctccttcagcctcgaacagctccaggagtatgccgatgcggatctgtccgtcgtcgagaagctgaaggaaatcatcattcagaaggtcgacgagatctataaagtgtacgggtccagcgagaagctgttcgacgccgactttgtgctcgagaagtccctcaaaaagaatgacgccgtggtggccattatgaaagacctgctcgactccgtgaagtccttcgaaaattacattaaagcgttctttggggaggggaaggaaactaacagggatgagtccttctatggcgactttgtcctcgcgtacgacatcctgctgaaggtcgaccacatttacgacgcgatccgcaactacgtgacacagaagccgtactccaaagacaagttcaagctgtacttccagaacccgcaatttatggggggctgggacaaggataaagagacagactaccgcgcgacaattctccgctatggctccaaatactatctggccatcatggacaagaagtacgcgaagtgcctgcagaagatcgacaaagacgacgtcaatggcaactatgaaaagatcaactacaagctgctgccgggtccgaacaagatgctcccgaaggtgttcttcagcaagaagtggatggcctactacaatccaagcgaggatattcagaaaatctataaaaacgggaccttcaagaagggggacatgtttaacctcaacgactgccacaagctcattgatttcttcaaggatagcatttcccgctacccgaaatggtccaatgcgtacgattttaacttctccgagacagaaaagtacaaagacatcgcgggcttttacagggaggtggaggagcaagggtataaagtttcttttgaatccgcgagcaagaaggaagtcgacaagctcgtcgaggagggcaagctctacatgttccaaatttataacaaggacttttccgacaagagccatgggaccccaaacctccacaccatgtacttcaaactgctctttgacgagaacaaccacgggcaaatcaggctgagcggcggcgccgaattattcatgcgcagggcctccctcaagaaggaagagctggtcgtccatccagccaattccccgatcgcgaacaagaacccggacaatccgaaaaagaccaccaccctgtcctacgacgtctacaaggacaaacgcttcagcgaagaccagtacgaattacacatcccaattgcgattaataagtgcccaaagaatatcttcaaaattaatacagaggtcagggtgctgctcaaacacgacgacaatccgtatgtcatcggcattgacaggggcgagcgcaatctgctctatatcgtggtcgtggatgggaagggcaatattgtggagcagtactccctgaacgagattatcaacaacttcaatgggattaggattaagaccgactatcacagcctgctcgacaagaaagaaaaagagaggtttgaggcccgccaaaactggacctccattgagaatatcaaagaattaaaggccggctatatttcccaagtcgtccacaagatctgcgagctggtggagaaatatgacgccgtgattgcgctcgaagacttaaattctgggttcaagaactcccgcgtgaaggtggaaaaacaggtgtatcagaaattcgagaaaatgctgatcgacaaactcaattatatggtggataagaagtccaacccgtgtgccacagggggcgcgctgaagggctatcagatcaccaacaagttcgagagcttcaagagcatgagcacccagaacgggtttattttctacatcccggcgtggctcacctccaagattgacccgagcaccggcttcgtgaacctcctgaagacaaagtatacctccattgccgacagcaagaagtttatctcctccttcgaccgcattatgtatgtgccggaggaggacctcttcgagttcgccctcgactacaaaaacttcagccgcacagatgcggattacatcaagaagtggaagctgtactcctacgggaacaggatccgcatcttcaggaatccaaaaaaaaataacgtctttgactgggaggaagtgtgcctgacatccgcctacaaggaactgttcaataaatacggcatcaattaccagcagggcgacattcgcgccctcctctgtgagcagtccgacaaagcgttttactccagcttcatggccctcatgtccctgatgctccaaatgaggaatagcatcacagggcgcaccgacgtcgacttcctcatcagcccggtgaagaactccgacgggatcttttacgactcccgcaactatgaggcgcaagagaatgcgatcctcccgaagaacgccgatgcgaacggggcctataatatcgccaggaaagtgctctgggccatcgggcagttcaaaaaggcggaggatgagaagctcgacaaggtgaaaattgccatttccaacaaggagtggctggagtacgcgcagacctccgtgaagcactgaaagggctctctgtcatgatttcatactttcattattgagctctgtaattacaattatgaccatgagaacatctcttattgtgtggccttttaattgctgatgttagtactgaaccaaagcttatcgtgatgatgtaaaagcaataagtacttgtttgtagcttctttgtgtctccctttgggcttaatacatctgtttagtgttgtggctttggcatagacttctcttggtaataatgccttgcaatgcaaaatttcaattatcaaattctattatgttctcaccttatggtaacagcttaccctgtggaagatgagattcttgagttgagtcattgccaatttttggcattagcttttgaattagtgaattttgacaaaaattaccgtgacactgattttgttgaagctcttaagtgtagtttttacaaaatttcagtggctcgttgtgattatgtcaaactcacggcgaatgtagttcttacagaatttcagtggctccctgcaggatcccaatggcgcgcctagctaactagctagccacgtgactcgcagaacgttgtgtggcgagacggaaagaaagtcacgcctccaaagagtgcagcatctcttctggctctcacggtcctctgtggatccatcgatatcgaattcctgcaggctcgaggtcattcatatgcttgagaagagagtcgggatagtccaaaataaaacaaaggtaagattacctggtcaaaagtgaaaacatcagttaaaaggtggtataaagtaaaatatcggtaataaaaggtggcccaaagtgaaatttactcttttctactattataaaaattgaggatgtttttgtcggtactttgatacgtcatttttgtatgaattggtttttaagtttattcgcttttggaaatgcatatctgtatttgagtcgggttttaagttcgtttgcttttgtaaatacagagggatttgtataagaaatatctttagaaaaacccatatgctaatttgacataatttttgagaaaaatatatattcaggcgaattctcacaatgaacaataataagattaaaatagctttcccccgttgcagcgcatgggtattttttctagtaaaaataaaagataaacttagactcaaaacatttacaaaaacaacccctaaagttcctaaagcccaaagtgctatccacgatccatagcaagcccagcccaacccaacccaacccaacccaccccagtccagccaactggacaatagtctccacacccccccactatcaccgtgagttgtccgcacgcaccgcacgtctcgcagccaaaaaaaaaaagaaagaaaaaaaagaaaaagaaaaaacagcaggtgggtccgggtcgtgggggccggaaacgcgaggaggatcgcgagccagcgacgaggagcttaggcctcatcgttgaagatgcctctgccgacagtggtcccaaagatggacccccacccacgaggagcatcgtggaaaaagaagacgttccaaccacgtcttcaaagcaagtggattgatgtgatatctccactgacgtaagggatgacgcacaatcccactatccttcgaggcctcatcgttgaagatgcctctgccgacagtggtcccaaagatggacccccacccacgaggagcatcgtggaaaaagaagacgttccaaccacgtcttcaaagcaagtggattgatgtgatatctccactgacgtaagggatgacgcacaatcccactatccttcgaagctccctccctccgcttccaaagaaacgccccccatcgccactatatacatacccccccctctcctcccatccccccaacccttctagaaccatcttccacacactcaagccacactattggagaacacacagggacaacacaccataagatccaagggaggcctccgccgccgccggtaaccaccccgcccctctcctctttctttctccgtttttttttccgtctcggtctcgatctttggccttggtagtttgggtgggcgagaggcggcttcgtgcgcgcccagatcggtgcgcgggaggggcgggatctcgcggctggggctctcgccggcgtggatccggcccggatctcgcggggaatggggctctcggatgtagatctgcgatccgccgttgttgggggagatgatggggggtttaaaatttccgccgtgctaaacaagatcaggaagaggggaaaagggcactatggtttatatttttatatatttctgctgcttcgtcaggcttagatgtgctagatctttctttcttctttttgtgggtagaatttgaatccctcagcattgttcatcggtagtttttcttttcatgatttgtgacaaatgcagcctcgtgcggagcttttttgtaggtagaaggcggccgcatggcccagtctaagcacgggttgacgaaggagatgactatgaagtatcgcatggaaggctgcgttgacggccacaaattcgtcattaccggcgagggcatcggctacccctttaaggtaagtttctgcttctacctttgatatatatataataattatcattaattagtagtaatataatatttcaaatatttttttcaaaataaaagaatgtagtatatagcaattgcttttctgtagtttataagtgtgtatattttaatttataacttttctaatatatgaccaaaatttgttgatgtgcagggcaagcaagcgataaacctgtgcgtggtggagggtggccctctgcccttcgccgaggatatactctcagccgccttcatgtacgggaatcgggtgttcacggagtacccgcaagacatcgtggactacttcaagaactcctgccccgccggatacacatgggaccgttccttcctcttcgaggacggagccgtttgcatctgcaacgcggacatcaccgtgtccgtcgaggagaactgcatgtaccacgagtcaaagttctatggagtgaacttcccggccgatggtcccgtgatgaagaaaatgacggacaactgggagccgtcgtgcgagaaaatcattcccgtcccaaaacagggaatcctcaagggcgacgtgtcgatgtacctacttctcaaggacggtggacggctacggtgccagttcgacactgtttacaaggcgaagtcggtgccgaggaagatgccggactggcactttatccagcacaagctgacaagggaggacagaagcgacgctaagaaccagaaatggcacctcaccgagcacgccatcgccagtggctctgcgctgcccgggtgaccctgcaatgtgaccctagacttgtccatcttctggattggccaacttaattaatgtatgaaataaaaggatgcacacatagtgacatgctaatcactataatgtgggcatcaaagttgtgtgttatgtgtaattactaattatctgaataagagaaagagatcatccatatttcttatcctaaatgaatgtcacgtgtctttataattctttgatgaaccagatgcattttattaaccaattccatatacatataaatattaatcatatataattaatatcaattgggttagcaaaacaaatctagtctaggtgtgttttgctaattattgggggatagtgcaaaaagaaatctacgttctcaataattcagatagaaaacttaataaagtgagataatttacatagattgcttttatcctttgatatatgtgaaaccatgcatgatataaggaaaatagatagagaaataattttttacatcgttgaatatgtaaacaatttaattcaagaagctaggaatataaatattgaggagtttatgattattattattattttgatgttcaatgaagttttttttaatttcatatgaagtatacaaaaattcttcatagatttttgtttctatgccgtagttatctttaatatatttgtggttgaagaaatttattgctagaaacgaatggattgtcaatttttttttaaagcaaatatatatgaaattatactgtatattattttagtcatgattaaaatgtggccttaattgaatcatctttctcattcattttttcaaaagcatatcaggatgattgatatttatctattttaaaaattaatttaagggttcaaattaaatttaacttaaaagtgtcctaaccgtagttaaaggtttactttaaaaaaatactatgaaaaatctaatcttctatgaatcgagggcccggccgtgacggccacgagcgaactcctgcaggcgataaaaatgttttaaacgatatatattataaaaaaaaacgtttcaaaaataaatacaaaaatgtttttaaatatatataatttaactcattaaagaaaataaaaatgcaagtgcggtgacaagacaagctaaaagttgcaaaagaaatggcagggctataaggctcacctactcctggatttaccaaattttggttcgtccctatactcgaaaaataaaacaaaataaatttcagtatcttcgtttttgtatgctttgactgtgaggcgaggccaactttcttcttctgtctgagatgaattttgtttgcctcctgtgaaggatgtatcattcaaagtgaatgttttgcaactgccagtagtcccacatcgaccaaatattcttattacagtgtgtttatatagcacctggagaaggaatgggttgtttcaaagattaaataatttctactaagtgtagattgccgttaatttgagagtccaagtaatttctactaagtgtagatttttttttgcggccgcacaacaaacgcgccggcga

SEQ ID NO: 161 - DNA, 7858 bp, synthetic construct
  misc_feature 1..7858: note = pWISE3121 Full Plasmid Sequence
  source 1..7858: mol_type = other DNA
cggaaggagctgactgggttgaaggctctcaagggcatcggtcgagatcccggtgcctaatgagtgagctaacttacattaattgcgttgcgccccgggatgagattatcaaaaaggatcttcacctagatccttttaaattaaaaatgaagttttaaatcaatctaaagtatatatgtgtaacattggtctagtgattggatccttgacagctagctcagtcctaggtactgtgctagcgctagcaaagaggagaaaggtaccatgcccgatcgagctcaagttatcattcgcattgtgccgggaggtggcaccaagacccttcaacaaattatcaatcagttggagtatctatcccggaagggcaggctggagctgcagcgttcagcccgacatctcgatattcccctgccaccggatcaaatccacgaacttgcccgaagctgggttcaagagactggaacttatgacgaaagtcagccagacgaggaaaggcaacaggagttgaccacccatattattgtaagcttccccgccggtacaagccaggtagcggcttatgcggcgagccgggagtgggcagccgagatgtttgggtcaggcgcaggggggggccgatacaactatcttacggccttccacatcgatcgcgaccacccacatctgcatgtcgtcgtcaatcggcgcgaacttttaggacacggctggctgaagatatctcggcgccatccccaactgaattacgacgccctgcgcataaagatggccgagatttcacttcgtcatggcattgccctcgatgcgagccgacgagcagaacgtggcatcaccgagcggccgatcacttatgcccaatatcggcgccttgagcgggagcaggctcgccaaatccgtttcgaagacgcggatttggaacagtcgtcgccgcaaggagatcatccagaattcagccaacctttcgatacatccccatttgaagcatccgcgggcggaccggaggacatgcctcggcccaacaatcggcagaatgagtcgcaagttcatctccaggagccagctggtgtcagcaacgaagccggtgtccttgtgcgggttgcattggaaacggagcgccttgctcaaccattcgtttccgaaaccattctcgcggacgacatagggagcggctcttcgcgtgttgccgagggccgtgtggagagcgcaaaccgcactcccgatattcctcgcgcagcaactgaagctgccacgcacacgacacacgaccggcagcggcgtgcaaagcgtcctcatgatgacgacggagggccgagtggagcaaaacgtgtgacattggaaggcatcgcggttgggccccaggcgaacgccggcgaacaggatggcagtagtgggggctcctcgggtggcagcatgagcggatcaaagaaacgtaggatcaagcaagatggtccggatattgttatgacccagagcccgagcagcctgagtgctagcgttggtgaccgtgttaccattacgtgccgtagctcgaccggtgcggtgaccacttctaactatgccagctgggttcaggagaaaccgggtaaacttttcaaaggtcttatcggcggtacgaacaaccgtgcgcctggtgtgccaagccgtttctccggttctctgatcggcgacaaagctactctgaccatctcttccctgcagccggaagattttgcgacctacttctgcgcgctgtggtatagcaatcactgggtgtttggccaaggtacgaaagtggagctgaagcgcggtggtggcggctccggcggaggcggctccggtggcggcggaagctccggcggcggcagcgaagttaaactgctggagtcggggggcggtctggttcaaccgggtggttctctcaagttgtcttgtgctgtgagcggttttagcttgaccgactacggcgtgaattgggtgcgtcaggcaccgggccgtggtctggaatggattggcgtcatctggggcgatggtattacggactacaacagcgcgctgaaggaccgcttcatcatcagcaaggacaatggtaagaacaccgtctatctgcaaatgagcaaggtgagatccgatgacaccgcattgtactactgcgtcaccggtttgtttgattactggggtcagggcaccttggttaccgtgagctcctatccgtatgacgttccggattacgccggtagcaagaaacgccgtattaaacaagattccggtagtggggggtcctctggtggaagtagtggccccttagtacggcaagctggaacgtcacggccatctccaccgacggccacgacgcgggccagcaccgcaaccgattcattgtctgctacagcccacctccagcaacggagaggtgtcctttcaaagcgtccgcgtgaagatgatgatggagaaccgagtgaacgcaaacgcgagagagatgagcgcagcaaggacgggcgtgggggaaataggagatagtctagaccaggcatcaaataaaacgaaaggctcagtcgaaagactgggcctttcgttttatctgttgtttgtcggtgaacgctctctactagagtcacactggctcaccttcgggtgggcctttctgcgtttatagtacgatatcccaatggcgcgccgagcttggctcgagcatggtcatagctgtttcctgtgtgaaattgttatccgctcacaattccacacaacatacgagccggaagcataaagtgtaaagcctggggtgcctaatgagtgagctaactcacattaattgcgttgcgctcactgcccgctttccagtcgggaaacctgtcgtgccagctgcattaatgaatcggccaacgcgcggggagaggcggtttgcgtattgggcgctgttccgcttcctcgctcactgactcgctgcgctcggtcgttcggctgcggcgagcggtatcagctcactcaaaggcggtaatacggttatccacagaatcaggggataacgcaggaaagaacatgtgagcaaaaggccagcaaaaggccaggaaccgtaaaaaggccgcgttgctggcgtttttccataggctccgcccccctgacgagcatcacaaaaatcgacgctcaagtcagaggtggcgaaacccgacaggactataaagataccaggcgtttccccctggaagctccctcgtgcgctctcctgttccgaccctgccgcttaccggatacctgtccgcctttctcccttcgggaagcgtggcgctttctcatagctcacgctgtaggtatctcagttcggtgtaggtcgttcgctccaagctgggctgtgtgcacgaaccccccgttcagcccgaccgctgcgccttatccggtaactatcgtcttgagtccaacccggtaagacacgacttatcgccactggcagcagccactggtaacaggattagcagagcgaggtatgtaggcggtgctacagagttcttgaagtggtggcctaactacggctacactagaagaacagtatttggtatctgcgctctgctgaagccagttaccttcggaaaaagagttggtagctcttgatccggcaaacaaaccaccgctggtagcggtggtttttttgtttgcaagcagcagattacgcgcagaaaaaaaggatctcaagaagatcctttgatcttttctacggggtctgacgctcagtggaacgaaaactcacgttaagggattttggtcatgagattatcaaaaaggatcttcacctagatccttttaaattaaaaatgaagttttaaatcaatctaaagtatatatgagtaaacttggtctgacagttagaaaaactcatcgagcatcaaatgaaactgcaatttattcatatcaggattatcaataccatatttttgaaaaagccgtttctgtaatgaaggagaaaactcaccgaggcagttccataggatggcaagatcctggtatcggtctgcgattccgactcgtccaacatcaatacaacctattaatttcccctcgtcaaaaataaggttatcaagtgagaaatcaccatgagtgacgactgaatccggtgagaatggcaaaagtttatgcatttctttccagacttgttcaacaggccagccattacgctcgtcatcaaaatcactcgcatcaaccaaaccgttattcattcgtgattgcgcctgagcgaaacgaaatacgcgatcgctgttaaaaggacaattacaaacaggaatcgaatgcaaccggcgcaggaacactgccagcgcatcaacaatattttcacctgaatcaggatattcttctaatacctggaatgctgttttcccagggatcgcagtggtgagtaaccatgcatcatcaggagtacggataaaatgcttgatggtcggaagaggcataaattccgtcagccagtttagtctgaccatctcatctgtaacatcattggcaacgctacctttgccatgtttcagaaacaactctggcgcatcgggcttcccatacaatcgatagattgtcgcacctgattgcccgacattatcgcgagcccatttatacccatataaatcagcatccatgttggaatttaatcgcggcctagagcaagacgtttcccgttgaatatggctcatactcttcctttttcaatattattgaagcatttatcagggttattgtctcatgagcggatacatatttgaatgtatttagaaaaataaacaaataggggttccgcgcacatttccccgaaaagtgccacctgacgtctaagaaaccattattatcatgacattaacctataaaaataggcgtatcacgaggcccttttgtctcgcgcgtttcggtgatgacggtgaaaacctctgacacatgcagctcccggagactgtcacagcttgtctgtaagcggatgccgggagcagacaagcccgtcagggcgcgtcagcgggtgttggcgggtgtcggggctggcttaactatgcggcatcagagcagattgtactgagagtgcaccatatgcggtgtgaaataccgcacagatgcgtaaggagaaaataccgcatcaggcgccattcgccattcaggctgcgcaactgttgggaagggcgatcggtgcgggcctcttcgctattacgccagctggcgaaagggggatgtgctgcaaggcgattaagttgggtaacgccagggttttcccagtcacgacgttgtaaaacgacggccagtgaattgacgcgttgcggctgcatgaaatcctggccggtttgtctgatgccaagctggcggcctggccggccagcttggccgctgaagaaaccgagcgccgccgtctaaaaaggtgatgtgtatttgagtaaaacagcttgcgtcatgcggtcgctgcgtatatgatgcgatgagtaaataaacaaatacgcaaggggaacgcatgaaggttatcgctgtacttaaccagaaaggcgggtcaggcaagacgaccatcgcaacccatctagcccgcgccctgcaactcgccggggccgatgttctgttagtcgattccgatccccagggcagtgcccgcgattgggcggccgtgcgggaagatcaaccgctaaccgttgtcggcatcgaccgcccgacgattgaccgcgacgtgaaggccatcggccggcgcgacttcgtagtgatcgacggagcgccccaggcggcggacttggctgtgtccgcgatcaaggcagccgacttcgtgctgattccggtgcagccaagcccttacgacatatgggccaccgccgacctggtggagctggttaagcagcgcattgaggtcacggatggaaggctacaagcggcctttgtcgtgtcgcgggcgatcaaaggcacgcgcatcggcggtgaggttgccgaggcgctggccgggtacgagctgcccattcttgagtcccgtatcacgcagcgcgtgagctacccaggcactgccgccgccggcacaaccgttcttgaatcagaacccgagggcgacgctgcccgcgaggtccaggcgctggccgctgaaattaaatcaaaactcatttgagttaatgaggtaaagagaaaatgagcaaaagcacaaacacgctaagtgccggccgtccgagcgcacgcagcagcaaggctgcaacgttggccagcctggcagacacgccagccatgaagcgggtcaactttcagttgccggcggaggatcacaccaagctgaagatgtacgcggtacgccaaggcaagaccattaccgagctgctatctgaatacatcgcgcagctaccagagtaaatgagcaaatgaataaatgagtagatgaattttagcggctaaaggaggcggcatggaaaatcaagaacaaccaggcaccgacgccgtggaatgccccatgtgtggaggaacgggcggttggccaggcgtaagcggctgggttgtctgccggccctgcaatggcactggaacccccaagcccgaggaatcggcgtgagcggtcgcaaaccatccggcccggtacaaatcggcgcggcgctgggtgatgacctggtggagaagttgaaggccgcgcaggccgcccagcggcaacgcatcgaggcagaagcacgccccggtgaatcgtggcaagcggccgctgatcgaatccgcaaagaatcccggcaaccgccggcagccggtgcgccgtcgattaggaagccgcccaagggcgacgagcaaccagattttttcgttccgatgctctatgacgtgggcacccgcgatagtcgcagcatcatggacgtggccgttttccgtctgtcgaagcgtgaccgacgagctggcgaggtgatccgctacgagcttccagacgggcacgtagaggtttccgcagggccggccggcatggccagtgtgtgggattacgacctggtactgatggcggtttcccatctaaccgaatccatgaaccgataccgggaagggaagggagacaagcccggccgcgtgttccgtccacacgttgcggacgtactcaagttctgccggcgagccgatggcggaaagcagaaagacgacctggtagaaacctgcattcggttaaacaccacgcacgttgccatgcagcgtacgaagaaggccaagaacggccgcctggtgacggtatccgagggtgaagccttgattagccgctacaagatcgtaaagagcgaaaccgggcggccggagtacatcgagatcgagctagctgattggatgtaccgcgagatcacagaaggcaagaacccggacgtgctgacggttcaccccgattactttttgatcgatcccggcatcggccgttttctctaccgcctggcacgccgcgccgcaggcaaggcagaagccagatggttgttcaagacgatctacgaacgcagtggcagcgccggagagttcaagaagttctgtttcaccgtgcgcaagctgatcgggtcaaatgacctgccggagtacgatttgaaggaggaggcggggcaggctggcccgatcctagtcatgcgctaccgcaacctgatcgagggcgaagcatccgccggttcctaatgtacggagcagatgctagggcaaattgccctagcaggggaaaaaggtcgaaaaggtctctttcctgtggatagcacgtacattgggaacccaaagccgtacattgggaaccggaacccgtacattgggaacccaaagccgtacattgggaaccggtcacacatgtaagtgactgatataaaagagaaaaaaggcgatttttccgcctaaaactctttaaaacttattaaaactcttaaaacccgcctggcctgtgcatatgctagtcatgccccgcgcccac

SEQ ID NO: 162 - DNA, 8116 bp, synthetic construct
  misc_feature 1..8116: note = pWISE3117 Full Plasmid Sequence
  source 1..8116: mol_type = other DNA
caccggaaggagctgactgggttgaaggctctcaagggcatcggtcgagatcccggtgcctaatgagtgagctaacttacattaattgcgttgcgccccgggatgagattatcaaaaaggatcttcacctagatccttttaaattaaaaatgaagttttaaatcaatctaaagtatatatgtgtaacattggtctagtgattggatccttgacagctagctcagtcctaggtactgtgctagcgctagcaaagaggagaaaggtaccatgcccgatcgagctcaagttatcattcgcattgtgccgggaggtggcaccaagacccttcaacaaattatcaatcagttggagtatctatcccggaagggcaggctggagctgcagcgttcagcccgacatctcgatattcccctgccaccggatcaaatccacgaacttgcccgaagctgggttcaagagactggaacttatgacgaaagtcagccagacgaggaaaggcaacaggagttgaccacccatattattgtaagcttccccgccggtacaagccaggtagcggcttatgcggcgagccgggagtgggcagccgagatgtttgggtcaggcgcaggggggggccgatacaactatcttacggccttccacatcgatcgcgaccacccacatctgcatgtcgtcgtcaatcggcgcgaacttttaggacacggctggctgaagatatctcggcgccatccccaactgaattacgacgccctgcgcataaagatggccgagatttcacttcgtcatggcattgccctcgatgcgagccgacgagcagaacgtggcatcaccgagcggccgatcacttatgcccaatatcggcgccttgagcgggagcaggctcgccaaatccgtttcgaagacgcggatttggaacagtcgtcgccgcaaggagatcatccagaattcagccaacctttcgatacatccccatttgaagcatccgcgggcggaccggaggacatgcctcggcccaacaatcggcagaatgagtcgcaagttcatctccaggagccagctggtgtcagcaacgaagccggtgtccttgtgcgggttgcattggaaacggagcgccttgctcaaccattcgtttccgaaaccattctcgcggacgacatagggagcggctcttcgcgtgttgccgagggccgtgtggagagcgcaaaccgcactcccgatattcctcgcgcagcaactgaagctgccacgcacacgacacacgaccggcagcggcgtgcaaagcgtcctcatgatgacgacggagggccgagtggagcaaaacgtgtgacattggaaggcatcgcggttgggccccaggcgaacgccggcgaacaggatggcagtagtgggggctcctcgggtggcagcatgagcggatcaaagaaaagaaggatcaagcaagatgaggaattgctgagtaaaaactaccatcttgagaacgaagttgcccgtctgaagaagggtagcggttcgggcggtagcggttccggaggtagcggcagcggctcgggtggtagcggttcaggtggctcaggcagtggtgaagaattgctgagcaaaaattatcacctggagaatgaagttgcgcgtctgaagaaaggcagcggctccggtggttctggctcgggcggttcaggtagtggttccggtggctccggcagcggtggttctggctccggtgaagagttgttgtccaagaattatcatctggaaaacgaagtggcaagactcaagaagggttcgggttcgggcggcagcggaagtggtggtagcggaagcggcagcggcggctccggctccggtggctccggcagcggtgaggagctgctgagcaagaactaccacttggagaacgaagtggcacgcctgaagaaaggtagcggtagcggcggttctgggagcggtggctccggaagcggcagcggcggttcgggttctggtggcagcggtagcggcgaagagctgcttagcaaaaattatcaccttgagaacgaggtcgctcgcctgaaaaaaggttccggcagcggcggtagcggtagcggtggcagcggtagcggcagcggtggctcggggtccggtggtagcggctccggtgaagaattgttgtccaaaaactaccacctggagaatgaagtggcgcgtctgaaaaagggtagcggcagcggtggtagcggctctggaggtagcggctccggtagtggcggtagcgggtctggcggctctggttcaggcgaagaactgctcagcaagaattaccatttggagaacgaggttgcgcgcctgaaaaagggctctggtagcggcggttctggctctggtggcagcgggagcggctccggtggcagcggctctggaggttccggttcgggtgaggagctgctgagcaagaactaccacctggaaaacgaggtggcgcgtctgaaaaaaggcagcaagaaacgtcgtatcaaacaggactccggtagtggggggtcctctggtggaagtagtggccccttagtacggcaagctggaacgtcacggccatctccaccgacggccacgacgcgggccagcaccgcaaccgattcattgtctgctacagcccacctccagcaacggagaggtgtcctttcaaagcgtccgcgtgaagatgatgatggagaaccgagtgaacgcaaacgcgagagagatgagcgcagcaaggacgggcgtgggggaaataggagatagtctagaccaggcatcaaataaaacgaaaggctcagtcgaaagactgggcctttcgttttatctgttgtttgtcggtgaacgctctctactagagtcacactggctcaccttcgggtgggcctttctgcgtttatagtacgatatcccaatggcgcgccgagcttggctcgagcatggtcatagctgtttcctgtgtgaaattgttatccgctcacaattccacacaacatacgagccggaagcataaagtgtaaagcctggggtgcctaatgagtgagctaactcacattaattgcgttgcgctcactgcccgctttccagtcgggaaacctgtcgtgccagctgcattaatgaatcggccaacgcgcggggagaggcggtttgcgtattgggcgctgttccgcttcctcgctcactgactcgctgcgctcggtcgttcggctgcggcgagcggtatcagctcactcaaaggcggtaatacggttatccacagaatcaggggataacgcaggaaagaacatgtgagcaaaaggccagcaaaaggccaggaaccgtaaaaaggccgcgttgctggcgtttttccataggctccgcccccctgacgagcatcacaaaaatcgacgctcaagtcagaggtggcgaaacccgacaggactataaagataccaggcgtttccccctggaagctccctcgtgcgctctcctgttccgaccctgccgcttaccggatacctgtccgcctttctcccttcgggaagcgtggcgctttctcatagctcacgctgtaggtatctcagttcggtgtaggtcgttcgctccaagctgggctgtgtgcacgaaccccccgttcagcccgaccgctgcgccttatccggtaactatcgtcttgagtccaacccggtaagacacgacttatcgccactggcagcagccactggtaacaggattagcagagcgaggtatgtaggcggtgctacagagttcttgaagtggtggcctaactacggctacactagaagaacagtatttggtatctgcgctctgctgaagccagttaccttcggaaaaagagttggtagctcttgatccggcaaacaaaccaccgctggtagcggtggtttttttgtttgcaagcagcagattacgcgcagaaaaaaaggatctcaagaagatcctttgatcttttctacggggtctgacgctcagtggaacgaaaactcacgttaagggattttggtcatgagattatcaaaaaggatcttcacctagatccttttaaattaaaaatgaagttttaaatcaatctaaagtatatatgagtaaacttggtctgacagttagaaaaactcatcgagcatcaaatgaaactgcaatttattcatatcaggattatcaataccatatttttgaaaaagccgtttctgtaatgaaggagaaaactcaccgaggcagttccataggatggcaagatcctggtatcggtctgcgattccgactcgtccaacatcaatacaacctattaatttcccctcgtcaaaaataaggttatcaagtgagaaatcaccatgagtgacgactgaatccggtgagaatggcaaaagtttatgcatttctttccagacttgttcaacaggccagccattacgctcgtcatcaaaatcactcgcatcaaccaaaccgttattcattcgtgattgcgcctgagcgaaacgaaatacgcgatcgctgttaaaaggacaattacaaacaggaatcgaatgcaaccggcgcaggaacactgccagcgcatcaacaatattttcacctgaatcaggatattcttctaatacctggaatgctgttttcccagggatcgcagtggtgagtaaccatgcatcatcaggagtacggataaaatgcttgatggtcggaagaggcataaattccgtcagccagtttagtctgaccatctcatctgtaacatcattggcaacgctacctttgccatgtttcagaaacaactctggcgcatcgggcttcccatacaatcgatagattgtcgcacctgattgcccgacattatcgcgagcccatttatacccatataaatcagcatccatgttggaatttaatcgcggcctagagcaagacgtttcccgttgaatatggctcatactcttcctttttcaatattattgaagcatttatcagggttattgtctcatgagcggatacatatttgaatgtatttagaaaaataaacaaataggggttccgcgcacatttccccgaaaagtgccacctgacgtctaagaaaccattattatcatgacattaacctataaaaataggcgtatcacgaggcccttttgtctcgcgcgtttcggtgatgacggtgaaaacctctgacacatgcagctcccggagactgtcacagcttgtctgtaagcggatgccgggagcagacaagcccgtcagggcgcgtcagcgggtgttggcgggtgtcggggctggcttaactatgcggcatcagagcagattgtactgagagtgcaccatatgcggtgtgaaataccgcacagatgcgtaaggagaaaataccgcatcaggcgccattcgccattcaggctgcgcaactgttgggaagggcgatcggtgcgggcctcttcgctattacgccagctggcgaaagggggatgtgctgcaaggcgattaagttgggtaacgccagggttttcccagtcacgacgttgtaaaacgacggccagtgaattgacgcgttgcggctgcatgaaatcctggccggtttgtctgatgccaagctggcggcctggccggccagcttggccgctgaagaaaccgagcgccgccgtctaaaaaggtgatgtgtatttgagtaaaacagcttgcgtcatgcggtcgctgcgtatatgatgcgatgagtaaataaacaaatacgcaaggggaacgcatgaaggttatcgctgtacttaaccagaaaggcgggtcaggcaagacgaccatcgcaacccatctagcccgcgccctgcaactcgccggggccgatgttctgttagtcgattccgatccccagggcagtgcccgcgattgggcggccgtgcgggaagatcaaccgctaaccgttgtcggcatcgaccgcccgacgattgaccgcgacgtgaaggccatcggccggcgcgacttcgtagtgatcgacggagcgccccaggcggcggacttggctgtgtccgcgatcaaggcagccgacttcgtgctgattccggtgcagccaagcccttacgacatatgggccaccgccgacctggtggagctggttaagcagcgcattgaggtcacggatggaaggctacaagcggcctttgtcgtgtcgcgggcgatcaaaggcacgcgcatcggcggtgaggttgccgaggcgctggccgggtacgagctgcccattcttgagtcccgtatcacgcagcgcgtgagctacccaggcactgccgccgccggcacaaccgttcttgaatcagaacccgagggcgacgctgcccgcgaggtccaggcgctggccgctgaaattaaatcaaaactcatttgagttaatgaggtaaagagaaaatgagcaaaagcacaaacacgctaagtgccggccgtccgagcgcacgcagcagcaaggctgcaacgttggccagcctggcagacacgccagccatgaagcgggtcaactttcagttgccggcggaggatcacaccaagctgaagatgtacgcggtacgccaaggcaagaccattaccgagctgctatctgaatacatcgcgcagctaccagagtaaatgagcaaatgaataaatgagtagatgaattttagcggctaaaggaggcggcatggaaaatcaagaacaaccaggcaccgacgccgtggaatgccccatgtgtggaggaacgggcggttggccaggcgtaagcggctgggttgtctgccggccctgcaatggcactggaacccccaagcccgaggaatcggcgtgagcggtcgcaaaccatccggcccggtacaaatcggcgcggcgctgggtgatgacctggtggagaagttgaaggccgcgcaggccgcccagcggcaacgcatcgaggcagaagcacgccccggtgaatcgtggcaagcggccgctgatcgaatccgcaaagaatcccggcaaccgccggcagccggtgcgccgtcgattaggaagccgcccaagggcgacgagcaaccagattttttcgttccgatgctctatgacgtgggcacccgcgatagtcgcagcatcatggacgtggccgttttccgtctgtcgaagcgtgaccgacgagctggcgaggtgatccgctacgagcttccagacgggcacgtagaggtttccgcagggccggccggcatggccagtgtgtgggattacgacctggtactgatggcggtttcccatctaaccgaatccatgaaccgataccgggaagggaagggagacaagcccggccgcgtgttccgtccacacgttgcggacgtactcaagttctgccggcgagccgatggcggaaagcagaaagacgacctggtagaaacctgcattcggttaaacaccacgcacgttgccatgcagcgtacgaagaaggccaagaacggccgcctggtgacggtatccgagggtgaagccttgattagccgctacaagatcgtaaagagcgaaaccgggcggccggagtacatcgagatcgagctagctgattggatgtaccgcgagatcacagaaggcaagaacccggacgtgctgacggttcaccccgattactttttgatcgatcccggcatcggccgttttctctaccgcctggcacgccgcgccgcaggcaaggcagaagccagatggttgttcaagacgatctacgaacgcagtggcagcgccggagagttcaagaagttctgtttcaccgtgcgcaagctgatcgggtcaaatgacctgccggagtacgatttgaaggaggaggcggggcaggctggcccgatcctagtcatgcgctaccgcaacctgatcgagggcgaagcatccgccggttcctaatgtacggagcagatgctagggcaaattgccctagcaggggaaaaaggtcgaaaaggtctctttcctgtggatagcacgtacattgggaacccaaagccgtacattgggaaccggaacccgtacattgggaacccaaagccgtacattgggaaccggtcacacatgtaagtgactgatataaaagagaaaaaaggcgatttttccgcctaaaactctttaaaacttattaaaactcttaaaacccgcctggcctgtgcatatgctagtcatgccccgcgcc

SEQ ID NO: 163 - DNA, 7900 bp, synthetic construct
  misc_feature 1..7900: note = pWISE3107 Full Plasmid Sequence
  source 1..7900: mol_type = other DNA
gtcatgccccgcgcccaccggaaggagctgactgggttgaaggctctcaagggcatcggtcgagatcccggtgcctaatgagtgagctaacttacattaattgcgttgcgccccgggatgagattatcaaaaaggatcttcacctagatccttttaaattaaaaatgaagttttaaatcaatctaaagtatatatgtgtaacattggtctagtgattggatccttgacagctagctcagtcctaggtactgtgctagcgctagcaaagaggagaaaggtaccatgagcggatcaaagaaacgtaggatcaagcaagatggtccggatattgttatgacccagagcccgagcagcctgagtgctagcgttggtgaccgtgttaccattacgtgccgtagctcgaccggtgcggtgaccacttctaactatgccagctgggttcaggagaaaccgggtaaacttttcaaaggtcttatcggcggtacgaacaaccgtgcgcctggtgtgccaagccgtttctccggttctctgatcggcgacaaagctactctgaccatctcttccctgcagccggaagattttgcgacctacttctgcgcgctgtggtatagcaatcactgggtgtttggccaaggtacgaaagtggagctgaagcgcggtggtggcggctccggcggaggcggctccggtggcggcggaagctccggcggcggcagcgaagttaaactgctggagtcggggggcggtctggttcaaccgggtggttctctcaagttgtcttgtgctgtgagcggttttagcttgaccgactacggcgtgaattgggtgcgtcaggcaccgggccgtggtctggaatggattggcgtcatctggggcgatggtattacggactacaacagcgcgctgaaggaccgcttcatcatcagcaaggacaatggtaagaacaccgtctatctgcaaatgagcaaggtgagatccgatgacaccgcattgtactactgcgtcaccggtttgtttgattactggggtcagggcaccttggttaccgtgagctcctatccgtatgacgttccggattacgccggtagcaagaaacgccgtattaaacaagattccggtggaagttccggaggttcaagcgggtctgaaacgccgggcaccagcgagtcggcgaccccggaaagcagcggtggttcttccggcggtagcatgcccgatcgagctcaagttatcattcgcattgtgccgggaggtggcaccaagacccttcaacaaattatcaatcagttggagtatctatcccggaagggcaggctggagctgcagcgttcagcccgacatctcgatattcccctgccaccggatcaaatccacgaacttgcccgaagctgggttcaagagactggaacttatgacgaaagtcagccagacgaggaaaggcaacaggagttgaccacccatattattgtaagcttccccgccggtacaagccaggtagcggcttatgcggcgagccgggagtgggcagccgagatgtttgggtcaggcgcaggggggggccgatacaactatcttacggccttccacatcgatcgcgaccacccacatctgcatgtcgtcgtcaatcggcgcgaacttttaggacacggctggctgaagatatctcggcgccatccccaactgaattacgacgccctgcgcataaagatggccgagatttcacttcgtcatggcattgccctcgatgcgagccgacgagcagaacgtggcatcaccgagcggccgatcacttatgcccaatatcggcgccttgagcgggagcaggctcgccaaatccgtttcgaagacgcggatttggaacagtcgtcgccgcaaggagatcatccagaattcagccaacctttcgatacatccccatttgaagcatccgcgggcggaccggaggacatgcctcggcccaacaatcggcagaatgagtcgcaagttcatctccaggagccagctggtgtcagcaacgaagccggtgtccttgtgcgggttgcattggaaacggagcgccttgctcaaccattcgtttccgaaaccattctcgcggacgacatagggagcggctcttcgcgtgttgccgagggccgtgtggagagcgcaaaccgcactcccgatattcctcgcgcagcaactgaagctgccacgcacacgacacacgaccggcagcggcgtgcaaagcgtcctcatgatgacgacggagggccgagtggagcaaaacgtgtgacattggaaggcatcgcggttgggccccaggcgaacgccggcgaacaggatggcagtagtggccccttagtacggcaagctggaacgtcacggccatctccaccgacggccacgacgcgggccagcaccgcaaccgattcattgtctgctacagcccacctccagcaacggagaggtgtcctttcaaagcgtccgcgtgaagatgatgatggagaaccgagtgaacgcaaacgcgagagagatgagcgcagcaaggacgggcgtgggggaaataggagatagtctagaccaggcatcaaataaaacgaaaggctcagtcgaaagactgggcctttcgttttatctgttgtttgtcggtgaacgctctctactagagtcacactggctcaccttcgggtgggcctttctgcgtttatagtacgatatcccaatggcgcgccgagcttggctcgagcatggtcatagctgtttcctgtgtgaaattgttatccgctcacaattccacacaacatacgagccggaagcataaagtgtaaagcctggggtgcctaatgagtgagctaactcacattaattgcgttgcgctcactgcccgctttccagtcgggaaacctgtcgtgccagctgcattaatgaatcggccaacgcgcggggagaggcggtttgcgtattgggcgctgttccgcttcctcgctcactgactcgctgcgctcggtcgttcggctgcggcgagcggtatcagctcactcaaaggcggtaatacggttatccacagaatcaggggataacgcaggaaagaacatgtgagcaaaaggccagcaaaaggccaggaaccgtaaaaaggccgcgttgctggcgtttttccataggctccgcccccctgacgagcatcacaaaaatcgacgctcaagtcagaggtggcgaaacccgacaggactataaagataccaggcgtttccccctggaagctccctcgtgcgctctcctgttccgaccctgccgcttaccggatacctgtccgcctttctcccttcgggaagcgtggcgctttctcatagctcacgctgtaggtatctcagttcggtgtaggtcgttcgctccaagctgggctgtgtgcacgaaccccccgttcagcccgaccgctgcgccttatccggtaactatcgtcttgagtccaacccggtaagacacgacttatcgccactggcagcagccactggtaacaggattagcagagcgaggtatgtaggcggtgctacagagttcttgaagtggtggcctaactacggctacactagaagaacagtatttggtatctgcgctctgctgaagccagttaccttcggaaaaagagttggtagctcttgatccggcaaacaaaccaccgctggtagcggtggtttttttgtttgcaagcagcagattacgcgcagaaaaaaaggatctcaagaagatcctttgatcttttctacggggtctgacgctcagtggaacgaaaactcacgttaagggattttggtcatgagattatcaaaaaggatcttcacctagatccttttaaattaaaaatgaagttttaaatcaatctaaagtatatatgagtaaacttggtctgacagttagaaaaactcatcgagcatcaaatgaaactgcaatttattcatatcaggattatcaataccatatttttgaaaaagccgtttctgtaatgaaggagaaaactcaccgaggcagttccataggatggcaagatcctggtatcggtctgcgattccgactcgtccaacatcaatacaacctattaatttcccctcgtcaaaaataaggttatcaagtgagaaatcaccatgagtgacgactgaatccggtgagaatggcaaaagtttatgcatttctttccagacttgttcaacaggccagccattacgctcgtcatcaaaatcactcgcatcaaccaaaccgttattcattcgtgattgcgcctgagcgaaacgaaatacgcgatcgctgttaaaaggacaattacaaacaggaatcgaatgcaaccggcgcaggaacactgccagcgcatcaacaatattttcacctgaatcaggatattcttctaatacctggaatgctgttttcccagggatcgcagtggtgagtaaccatgcatcatcaggagtacggataaaatgcttgatggtcggaagaggcataaattccgtcagccagtttagtctgaccatctcatctgtaacatcattggcaacgctacctttgccatgtttcagaaacaactctggcgcatcgggcttcccatacaatcgatagattgtcgcacctgattgcccgacattatcgcgagcccatttatacccatataaatcagcatccatgttggaatttaatcgcggcctagagcaagacgtttcccgttgaatatggctcatactcttcctttttcaatattattgaagcatttatcagggttattgtctcatgagcggatacatatttgaatgtatttagaaaaataaacaaataggggttccgcgcacatttccccgaaaagtgccacctgacgtctaagaaaccattattatcatgacattaacctataaaaataggcgtatcacgaggcccttttgtctcgcgcgtttcggtgatgacggtgaaaacctctgacacatgcagctcccggagactgtcacagcttgtctgtaagcggatgccgggagcagacaagcccgtcagggcgcgtcagcgggtgttggcgggtgtcggggctggcttaactatgcggcatcagagcagattgtactgagagtgcaccatatgcggtgtgaaataccgcacagatgcgtaaggagaaaataccgcatcaggcgccattcgccattcaggctgcgcaactgttgggaagggcgatcggtgcgggcctcttcgctattacgccagctggcgaaagggggatgtgctgcaaggcgattaagttgggtaacgccagggttttcccagtcacgacgttgtaaaacgacggccagtgaattgacgcgttgcggctgcatgaaatcctggccggtttgtctgatgccaagctggcggcctggccggccagcttggccgctgaagaaaccgagcgccgccgtctaaaaaggtgatgtgtatttgagtaaaacagcttgcgtcatgcggtcgctgcgtatatgatgcgatgagtaaataaacaaatacgcaaggggaacgcatgaaggttatcgctgtacttaaccagaaaggcgggtcaggcaagacgaccatcgcaacccatctagcccgcgccctgcaactcgccggggccgatgttctgttagtcgattccgatccccagggcagtgcccgcgattgggcggccgtgcgggaagatcaaccgctaaccgttgtcggcatcgaccgcccgacgattgaccgcgacgtgaaggccatcggccggcgcgacttcgtagtgatcgacggagcgccccaggcggcggacttggctgtgtccgcgatcaaggcagccgacttcgtgctgattccggtgcagccaagcccttacgacatatgggccaccgccgacctggtggagctggttaagcagcgcattgaggtcacggatggaaggctacaagcggcctttgtcgtgtcgcgggcgatcaaaggcacgcgcatcggcggtgaggttgccgaggcgctggccgggtacgagctgcccattcttgagtcccgtatcacgcagcgcgtgagctacccaggcactgccgccgccggcacaaccgttcttgaatcagaacccgagggcgacgctgcccgcgaggtccaggcgctggccgctgaaattaaatcaaaactcatttgagttaatgaggtaaagagaaaatgagcaaaagcacaaacacgctaagtgccggccgtccgagcgcacgcagcagcaaggctgcaacgttggccagcctggcagacacgccagccatgaagcgggtcaactttcagttgccggcggaggatcacaccaagctgaagatgtacgcggtacgccaaggcaagaccattaccgagctgctatctgaatacatcgcgcagctaccagagtaaatgagcaaatgaataaatgagtagatgaattttagcggctaaaggaggcggcatggaaaatcaagaacaaccaggcaccgacgccgtggaatgccccatgtgtggaggaacgggcggttggccaggcgtaagcggctgggttgtctgccggccctgcaatggcactggaacccccaagcccgaggaatcggcgtgagcggtcgcaaaccatccggcccggtacaaatcggcgcggcgctgggtgatgacctggtggagaagttgaaggccgcgcaggccgcccagcggcaacgcatcgaggcagaagcacgccccggtgaatcgtggcaagcggccgctgatcgaatccgcaaagaatcccggcaaccgccggcagccggtgcgccgtcgattaggaagccgcccaagggcgacgagcaaccagattttttcgttccgatgctctatgacgtgggcacccgcgatagtcgcagcatcatggacgtggccgttttccgtctgtcgaagcgtgaccgacgagctggcgaggtgatccgctacgagcttccagacgggcacgtagaggtttccgcagggccggccggcatggccagtgtgtgggattacgacctggtactgatggcggtttcccatctaaccgaatccatgaaccgataccgggaagggaagggagacaagcccggccgcgtgttccgtccacacgttgcggacgtactcaagttctgccggcgagccgatggcggaaagcagaaagacgacctggtagaaacctgcattcggttaaacaccacgcacgttgccatgcagcgtacgaagaaggccaagaacggccgcctggtgacggtatccgagggtgaagccttgattagccgctacaagatcgtaaagagcgaaaccgggcggccggagtacatcgagatcgagctagctgattggatgtaccgcgagatcacagaaggcaagaacccggacgtgctgacggttcaccccgattactttttgatcgatcccggcatcggccgttttctctaccgcctggcacgccgcgccgcaggcaaggcagaagccagatggttgttcaagacgatctacgaacgcagtggcagcgccggagagttcaagaagttctgtttcaccgtgcgcaagctgatcgggtcaaatgacctgccggagtacgatttgaaggaggaggcggggcaggctggcccgatcctagtcatgcgctaccgcaacctgatcgagggcgaagcatccgccggttcctaatgtacggagcagatgctagggcaaattgccctagcaggggaaaaaggtcgaaaaggtctctttcctgtggatagcacgtacattgggaacccaaagccgtacattgggaaccggaacccgtacattgggaacccaaagccgtacattgggaaccggtcacacatgtaagtgactgatataaaagagaaaaaaggcgatttttccgcctaaaactctttaaaacttattaaaactcttaaaacccgcctggcctgtgcatatgcta

SEQ ID NO: 164 - DNA, 8002 bp, synthetic construct
  misc_feature 1..8002: note = pWISE3114 Full Plasmid Sequence
  source 1..8002: mol_type = other DNA
ccgcgcccaccggaaggagctgactgggttgaaggctctcaagggcatcggtcgagatcccggtgcctaatgagtgagctaacttacattaattgcgttgcgccccgggatgagattatcaaaaaggatcttcacctagatccttttaaattaaaaatgaagttttaaatcaatctaaagtatatatgtgtaacattggtctagtgattggatccttgacagctagctcagtcctaggtactgtgctagcgctagcaaagaggagaaaggtaccatgcccgatcgagctcaagttatcattcgcattgtgccgggaggtggcaccaagacccttcaacaaattatcaatcagttggagtatctatcccggaagggcaggctggagctgcagcgttcagcccgacatctcgatattcccctgccaccggatcaaatccacgaacttgcccgaagctgggttcaagagactggaacttatgacgaaagtcagccagacgaggaaaggcaacaggagttgaccacccatattattgtaagcttccccgccggtacaagccaggtagcggcttatgcggcgagccgggagtgggcagccgagatgtttgggtcaggcgcaggggggggccgatacaactatcttacggccttccacatcgatcgcgaccacccacatctgcatgtcgtcgtcaatcggcgcgaacttttaggacacggctggctgaagatatctcggcgccatccccaactgaattacgacgccctgcgcataaagatggccgagatttcacttcgtcatggcattgccctcgatgcgagccgacgagcagaacgtggcatcaccgagcggccgatcacttatgcccaatatcggcgccttgagcgggagcaggctcgccaaatccgtttcgaagacgcggatttggaacagtcgtcgccgcaaggagatcatccagaattcagccaacctttcgatacatccccatttgaagcatccgcgggcggaccggaggacatgcctcggcccaacaatcggcagaatgagtcgcaagttcatctccaggagccagctggtgtcagcaacgaagccggtgtccttgtgcgggttgcattggaaacggagcgccttgctcaaccattcgtttccgaaaccattctcgcggacgacatagggagcggctcttcgcgtgttgccgagggccgtgtggagagcgcaaaccgcactcccgatattcctcgcgcagcaactgaagctgccacgcacacgacacacgaccggcagcggcgtgcaaagcgtcctcatgatgacgacggagggccgagtggagcaaaacgtgtgacattggaaggcatcgcggttgggccccaggcgaacgccggcgaacaggatggcagtagtggccccttagtacggcaagctggaacgtcacggccatctccaccgacggccacgacgcgggccagcaccgcaaccgattcattgtctgctacagcccacctccagcaacggagaggtgtcctttcaaagcgtccgcgtgaagatgatgatggagaaccgagtgaacgcaaacgcgagagagatgagcgcagcaaggacgggcgtgggggaaataggagaagcggtggctcctcgggtggcagcatgagcggatcaaagaaacgtaggatcaagcaagatggtccggatattgttatgacccagagcccgagcagcctgagtgctagcgttggtgaccgtgttaccattacgtgccgtagctcgaccggtgcggtgaccacttctaactatgccagctgggttcaggagaaaccgggtaaacttttcaaaggtcttatcggcggtacgaacaaccgtgcgcctggtgtgccaagccgtttctccggttctctgatcggcgacaaagctactctgaccatctcttccctgcagccggaagattttgcgacctacttctgcgcgctgtggtatagcaatcactgggtgtttggccaaggtacgaaagtggagctgaagcgcggtggtggcggctccggcggaggcggctccggtggcggcggaagctccggcggcggcagcgaagttaaactgctggagtcggggggcggtctggttcaaccgggtggttctctcaagttgtcttgtgctgtgagcggttttagcttgaccgactacggcgtgaattgggtgcgtcaggcaccgggccgtggtctggaatggattggcgtcatctggggcgatggtattacggactacaacagcgcgctgaaggaccgcttcatcatcagcaaggacaatggtaagaacaccgtctatctgcaaatgagcaaggtgagatccgatgacaccgcattgtactactgcgtcaccggtttgtttgattactggggtcagggcaccttggttaccgtgagctcctatccgtatgacgttccggattacgccggtagcaagaaacgccgtattaaacaagattccggtggcagttccggtggcagcagtgcgtcgttagcaagaggcggtccaaatgcagtgggactcctaacgacgaacgaaagctttgagaaaaatatcaatgaggtctacaaccgtacgcgagccgagctagacgcttcttcacgtgacagaagtcgctctggactatcgcgataatctagaccaggcatcaaataaaacgaaaggctcagtcgaaagactgggcctttcgttttatctgttgtttgtcggtgaacgctctctactagagtcacactggctcaccttcgggtgggcctttctgcgtttatagtacgatatcccaatggcgcgccgagcttggctcgagcatggtcatagctgtttcctgtgtgaaattgttatccgctcacaattccacacaacatacgagccggaagcataaagtgtaaagcctggggtgcctaatgagtgagctaactcacattaattgcgttgcgctcactgcccgctttccagtcgggaaacctgtcgtgccagctgcattaatgaatcggccaacgcgcggggagaggcggtttgcgtattgggcgctgttccgcttcctcgctcactgactcgctgcgctcggtcgttcggctgcggcgagcggtatcagctcactcaaaggcggtaatacggttatccacagaatcaggggataacgcaggaaagaacatgtgagcaaaaggccagcaaaaggccaggaaccgtaaaaaggccgcgttgctggcgtttttccataggctccgcccccctgacgagcatcacaaaaatcgacgctcaagtcagaggtggcgaaacccgacaggactataaagataccaggcgtttccccctggaagctccctcgtgcgctctcctgttccgaccctgccgcttaccggatacctgtccgcctttctcccttcgggaagcgtggcgctttctcatagctcacgctgtaggtatctcagttcggtgtaggtcgttcgctccaagctgggctgtgtgcacgaaccccccgttcagcccgaccgctgcgccttatccggtaactatcgtcttgagtccaacccggtaagacacgacttatcgccactggcagcagccactggtaacaggattagcagagcgaggtatgtaggcggtgctacagagttcttgaagtggtggcctaactacggctacactagaagaacagtatttggtatctgcgctctgctgaagccagttaccttcggaaaaagagttggtagctcttgatccggcaaacaaaccaccgctggtagcggtggtttttttgtttgcaagcagcagattacgcgcagaaaaaaaggatctcaagaagatcctttgatcttttctacggggtctgacgctcagtggaacgaaaactcacgttaagggattttggtcatgagattatcaaaaaggatcttcacctagatccttttaaattaaaaatgaagttttaaatcaatctaaagtatatatgagtaaacttggtctgacagttagaaaaactcatcgagcatcaaatgaaactgcaatttattcatatcaggattatcaataccatatttttgaaaaagccgtttctgtaatgaaggagaaaactcaccgaggcagttccataggatggcaagatcctggtatcggtctgcgattccgactcgtccaacatcaatacaacctattaatttcccctcgtcaaaaataaggttatcaagtgagaaatcaccatgagtgacgactgaatccggtgagaatggcaaaagtttatgcatttctttccagacttgttcaacaggccagccattacgctcgtcatcaaaatcactcgcatcaaccaaaccgttattcattcgtgattgcgcctgagcgaaacgaaatacgcgatcgctgttaaaaggacaattacaaacaggaatcgaatgcaaccggcgcaggaacactgccagcgcatcaacaatattttcacctgaatcaggatattcttctaatacctggaatgctgttttcccagggatcgcagtggtgagtaaccatgcatcatcaggagtacggataaaatgcttgatggtcggaagaggcataaattccgtcagccagtttagtctgaccatctcatctgtaacatcattggcaacgctacctttgccatgtttcagaaacaactctggcgcatcgggcttcccatacaatcgatagattgtcgcacctgattgcccgacattatcgcgagcccatttatacccatataaatcagcatccatgttggaatttaatcgcggcctagagcaagacgtttcccgttgaatatggctcatactcttcctttttcaatattattgaagcatttatcagggttattgtctcatgagcggatacatatttgaatgtatttagaaaaataaacaaataggggttccgcgcacatttccccgaaaagtgccacctgacgtctaagaaaccattattatcatgacattaacctataaaaataggcgtatcacgaggcccttttgtctcgcgcgtttcggtgatgacggtgaaaacctctgacacatgcagctcccggagactgtcacagcttgtctgtaagcggatgccgggagcagacaagcccgtcagggcgcgtcagcgggtgttggcgggtgtcggggctggcttaactatgcggcatcagagcagattgtactgagagtgcaccatatgcggtgtgaaataccgcacagatgcgtaaggagaaaataccgcatcaggcgccattcgccattcaggctgcgcaactgttgggaagggcgatcggtgcgggcctcttcgctattacgccagctggcgaaagggggatgtgctgcaaggcgattaagttgggtaacgccagggttttcccagtcacgacgttgtaaaacgacggccagtgaattgacgcgttgcggctgcatgaaatcctggccggtttgtctgatgccaagctggcggcctggccggccagcttggccgctgaagaaaccgagcgccgccgtctaaaaaggtgatgtgtatttgagtaaaacagcttgcgtcatgcggtcgctgcgtatatgatgcgatgagtaaataaacaaatacgcaaggggaacgcatgaaggttatcgctgtacttaaccagaaaggcgggtcaggcaagacgaccatcgcaacccatctagcccgcgccctgcaactcgccggggccgatgttctgttagtcgattccgatccccagggcagtgcccgcgattgggcggccgtgcgggaagatcaaccgctaaccgttgtcggcatcgaccgcccgacgattgaccgcgacgtgaaggccatcggccggcgcgacttcgtagtgatcgacggagcgccccaggcggcggacttggctgtgtccgcgatcaaggcagccgacttcgtgctgattccggtgcagccaagcccttacgacatatgggccaccgccgacctggtggagctggttaagcagcgcattgaggtcacggatggaaggctacaagcggcctttgtcgtgtcgcgggcgatcaaaggcacgcgcatcggcggtgaggttgccgaggcgctggccgggtacgagctgcccattcttgagtcccgtatcacgcagcgcgtgagctacccaggcactgccgccgccggcacaaccgttcttgaatcagaacccgagggcgacgctgcccgcgaggtccaggcgctggccgctgaaattaaatcaaaactcatttgagttaatgaggtaaagagaaaatgagcaaaagcacaaacacgctaagtgccggccgtccgagcgcacgcagcagcaaggctgcaacgttggccagcctggcagacacgccagccatgaagcgggtcaactttcagttgccggcggaggatcacaccaagctgaagatgtacgcggtacgccaaggcaagaccattaccgagctgctatctgaatacatcgcgcagctaccagagtaaatgagcaaatgaataaatgagtagatgaattttagcggctaaaggaggcggcatggaaaatcaagaacaaccaggcaccgacgccgtggaatgccccatgtgtggaggaacgggcggttggccaggcgtaagcggctgggttgtctgccggccctgcaatggcactggaacccccaagcccgaggaatcggcgtgagcggtcgcaaaccatccggcccggtacaaatcggcgcggcgctgggtgatgacctggtggagaagttgaaggccgcgcaggccgcccagcggcaacgcatcgaggcagaagcacgccccggtgaatcgtggcaagcggccgctgatcgaatccgcaaagaatcccggcaaccgccggcagccggtgcgccgtcgattaggaagccgcccaagggcgacgagcaaccagattttttcgttccgatgctctatgacgtgggcacccgcgatagtcgcagcatcatggacgtggccgttttccgtctgtcgaagcgtgaccgacgagctggcgaggtgatccgctacgagcttccagacgggcacgtagaggtttccgcagggccggccggcatggccagtgtgtgggattacgacctggtactgatggcggtttcccatctaaccgaatccatgaaccgataccgggaagggaagggagacaagcccggccgcgtgttccgtccacacgttgcggacgtactcaagttctgccggcgagccgatggcggaaagcagaaagacgacctggtagaaacctgcattcggttaaacaccacgcacgttgccatgcagcgtacgaagaaggccaagaacggccgcctggtgacggtatccgagggtgaagccttgattagccgctacaagatcgtaaagagcgaaaccgggcggccggagtacatcgagatcgagctagctgattggatgtaccgcgagatcacagaaggcaagaacccggacgtgctgacggttcaccccgattactttttgatcgatcccggcatcggccgttttctctaccgcctggcacgccgcgccgcaggcaaggcagaagccagatggttgttcaagacgatctacgaacgcagtggcagcgccggagagttcaagaagttctgtttcaccgtgcgcaagctgatcgggtcaaatgacctgccggagtacgatttgaaggaggaggcggggcaggctggcccgatcctagtcatgcgctaccgcaacctgatcgagggcgaagcatccgccggttcctaatgtacggagcagatgctagggcaaattgccctagcaggggaaaaaggtcgaaaaggtctctttcctgtggatagcacgtacattgggaacccaaagccgtacattgggaaccggaacccgtacattgggaacccaaagccgtacattgggaaccggtcacacatgtaagtgactgatataaaagagaaaaaaggcgatttttccgcctaaaactctttaaaacttattaaaactcttaaaacccgcctggcctgtgcatatgctagtcatgcc

SEQ ID NO: 165 - DNA, 171 bp, synthetic construct
  source 1..171: mol_type = other DNA; note = Agrobacterium tumefaciens strain C58
ggcagttccggtggcagcagtgcgtcgttagcaagaggcggtccaaatgcagtgggactcctaacgacgaacgaaagctttgagaaaaatatcaatgaggtctacaaccgtacgcgagccgagctagacgcttcttcacgtgacagaagtcgctctggactatcgcgataa

SEQ ID NO: 166 - protein, 74 aa, synthetic construct
  source 1..74: note = Agrobacterium tumefaciens
SGPLVRQAGTSRPSPPTATTRASTATDSLSATAHLQQRRGVLSKRPREDDDGEPSERKRERDERSKDGRGGNRR

SEQ ID NO: 167 - protein, 50 aa, synthetic construct
  source 1..50: note = Agrobacterium tumefaciens strain C58
SASLARGGPNAVGLLTTNESFEKNINEVYNRTRAELDASSRDRSRSGLSR

SEQ ID NO: 168 - protein, 373 aa, synthetic construct
  source 1..373: note = Agrobacterium tumefaciens
MPDRAQVIIRIVPGGGTKTLQQIINQLEYLSRKGRLELQRSARHLDIPLPPDQIHELARSWVQETGTYDESQPDEERQQELTTHIIVSFPAGTSQVAAYAASREWAAEMFGSGAGGGRYNYLTAFHIDRDHPHLHVVVNRRELLGHGWLKISRRHPQLNYDALRIKMAEISLRHGIALDASRRAERGITERPITYAQYRRLEREQARQIRFEDADLEQSSPQGDHPEFSQPFDTSPFEASAGGPEDMPRPNNRQNESQVHLQEPAGVSNEAGVLVRVALETERLAQPFVSETILADDIGSGSSRVAEGRVESANRTPDIPRAATEAATHTTHDRQRRAKRPHDDDGGPSGAKRVTLEGIAVGPQANAGEQDGS

SEQ ID NO: 169 - protein, 275 aa, Saccharomyces cerevisiae
GSKKRRIKQDGPDIVMTQSPSSLSASVGDRVTITCRSSTGAVTTSNYASWVQEKPGKLFKGLIGGTNNRAPGVPSRFSGSLIGDKATLTISSLQPEDFATYFCALWYSNHWVFGQGTKVELKRGGGGSGGGGSGGGGSSGGGSEVKLLESGGGLVQPGGSLKLSCAVSGFSLTDYGVNWVRQAPGRGLEWIGVIWGDGITDYNSALKDRFIISKDNGKNTVYLQMSKVRSDDTALYYCVTGLFDYWGQGTLVTVSSYPYDVPDYAGSKKRRIKQD

SEQ ID NO: 170 - protein, 742 aa, synthetic construct
  REGION 1..742: note = Synthetic VirD2::scFV fusion
MPDRAQVIIRIVPGGGTKTLQQIINQLEYLSRKGRLELQRSARHLDIPLPPDQIHELARSWVQETGTYDESQPDEERQQELTTHIIVSFPAGTSQVAAYAASREWAAEMFGSGAGGGRYNYLTAFHIDRDHPHLHVVVNRRELLGHGWLKISRRHPQLNYDALRIKMAEISLRHGIALDASRRAERGITERPITYAQYRRLEREQARQIRFEDADLEQSSPQGDHPEFSQPFDTSPFEASAGGPEDMPRPNNRQNESQVHLQEPAGVSNEAGVLVRVALETERLAQPFVSETILADDIGSGSSRVAEGRVESANRTPDIPRAATEAATHTTHDRQRRAKRPHDDDGGPSGAKRVTLEGIAVGPQANAGEQDGSSGGSSGGSMSGSKKRRIKQDGPDIVMTQSPSSLSASVGDRVTITCRSSTGAVTTSNYASWVQEKPGKLFKGLIGGTNNRAPGVPSRFSGSLIGDKATLTISSLQPEDFATYFCALWYSNHWVFGQGTKVELKRGGGGSGGGGSGGGGSSGGGSEVKLLESGGGLVQPGGSLKLSCAVSGFSLTDYGVNWVRQAPGRGLEWIGVIWGDGITDYNSALKDRFIISKDNGKNTVYLQMSKVRSDDTALYYCVTGLFDYWGQGTLVTVSSYPYDVPDYAGSKKRRIKQDSGSGGSSGGSSGPLVRQAGTSRPSPPTATTRASTATDSLSATAHLQQRRGVLSKRPREDDDGEPSERKRERDERSKDGRGGNRR

SEQ ID NO: 171 - protein, 1228 aa, synthetic construct
  REGION 1..1228: note = Lachnospiraceae bacterium ND2006
MSKLEKFTNCYSLSKTLRFKAIPVGKTQENIDNKRLLVEDEKRAEDYKGVKKLLDRYYLSFINDVLHSIKLKNLNNYISLFRKKTRTEKENKELENLEINLRKEIAKAFKGNEGYKSLFKKDIIETILPEFLDDKDEIALVNSFNGFTTAFTGFFDNRENMFSEEAKSTSIAFRCINENLTRYISNMDIFEKVDAIFDKHEVQEIKEKILNSDYDVEDFFEGEFFNFVLTQEGIDVYNAIIGGFVTESGEKIKGLNEYINLYNQKTKQKLPKFKPLYKQVLSDRESLSFYGEGYTSDEEVLEVFRNTLNKNSEIFSSIKKLEKLFKNFDEYSSAGIFVKNGPAISTISKDIFGEWNVIRDKWNAEYDDIHLKKKAVVTEKYEDDRRKSFKKIGSFSLEQLQEYADADLSVVEKLKEIIIQKVDEIYKVYGSSEKLFDADFVLEKSLKKNDAVVAIMKDLLDSVKSFENYIKAFFGEGKETNRDESFYGDFVLAYDILLKVDHIYDAIRNYVTQKPYSKDKFKLYFQNPQFMGGWDKDKETDYRATILRYGSKYYLAIMDKKYAKCLQKIDKDDVNGNYEKINYKLLPGPNKMLPKVFFSKKWMAYYNPSEDIQKIYKNGTFKKGDMFNLNDCHKLIDFFKDSISRYPKWSNAYDFNFSETEKYKDIAGFYREVEEQGYKVSFESASKKEVDKLVEEGKLYMFQIYNKDFSDKSHGTPNLHTMYFKLLFDENNHGQIRLSGGAELFMRRASLKKEELVVHPANSPIANKNPDNPKKTTTLSYDVYKDKRFSEDQYELHIPIAINKCPKNIFKINTEVRVLLKHDDNPYVIGIDRGERNLLYIVVVDGKGNIVEQYSLNEIINNFNGIRIKTDYHSLLDKKEKERFEARQNWTSIENIKELKAGYISQVVHKICELVEKYDAVIALEDLNSGFKNSRVKVEKQVYQKFEKMLIDKLNYMVDKKSNPCATGGALKGYQITNKFESFKSMSTQNGFIFYIPAWLTSKIDPSTGFVNLLKTKYTSIADSKKFISSFDRIMYVPEEDLFEFALDYKNFSRTDADYIKKWKLYSYGNRIRIFRNPKKNNVFDWEEVCLTSAYKELFNKYGINYQQGDIRALLCEQSDKAFYSSFMALMSLMLQMRNSITGRTDVDFLISPVKNSDGIFYDSRNYEAQENAILPKNADANGAYNIARKVLWAIGQFKKAEDEKLDKVKIAISNKEWLEYAQTSVKH

SEQ ID NO: 172 - protein, 19 aa, Saccharomyces cerevisiae
EELLSKNYHLENEVARLKK

SEQ ID NO: 173 - protein, 1593 aa, synthetic construct
  REGION 1..1593: note = Synthetic 8xGCN4::Cas12a fusion
MAEELLSKNYHLENEVARLKKGSGSGGSGSGGSGSGSGGSGSGGSGSGEELLSKNYHLENEVARLKKGSGSGGSGSGGSGSGSGGSGSGGSGSGEELLSKNYHLENEVARLKKGSGSGGSGSGGSGSGSGGSGSGGSGSGEELLSKNYHLENEVARLKKGSGSGGSGSGGSGSGSGGSGSGGSGSGEELLSKNYHLENEVARLKKGSGSGGSGSGGSGSGSGGSGSGGSGSGEELLSKNYHLENEVARLKKGSGSGGSGSGGSGSGSGGSGSGGSGSGEELLSKNYHLENEVARLKKGSGSGGSGSGGSGSGSGGSGSGGSGSGEELLSKNYHLENEVARLKKGSSETPGTSESATPEGGSGGSGSSKLEKFTNCYSLSKTLRFKAIPVGKTQENIDNKRLLVEDEKRAEDYKGVKKLLDRYYLSFINDVLHSIKLKNLNNYISLFRKKTRTEKENKELENLEINLRKEIAKAFKGNEGYKSLFKKDIIETILPEFLDDKDEIALVNSFNGFTTAFTGFFDNRENMFSEEAKSTSIAFRCINENLTRYISNMDIFEKVDAIFDKHEVQEIKEKILNSDYDVEDFFEGEFFNFVLTQEGIDVYNAIIGGFVTESGEKIKGLNEYINLYNQKTKQKLPKFKPLYKQVLSDRESLSFYGEGYTSDEEVLEVFRNTLNKNSEIFSSIKKLEKLFKNFDEYSSAGIFVKNGPAISTISKDIFGEWNVIRDKWNAEYDDIHLKKKAVVTEKYEDDRRKSFKKIGSFSLEQLQEYADADLSVVEKLKEIIIQKVDEIYKVYGSSEKLFDADFVLEKSLKKNDAVVAIMKDLLDSVKSFENYIKAFFGEGKETNRDESFYGDFVLAYDILLKVDHIYDAIRNYVTQKPYSKDKFKLYFQNPQFMGGWDKDKETDYRATILRYGSKYYLAIMDKKYAKCLQKIDKDDVNGNYEKINYKLLPGPNKMLPKVFFSKKWMAYYNPSEDIQKIYKNGTFKKGDMFNLNDCHKLIDFFKDSISRYPKWSNAYDFNFSETEKYKDIAGFYREVEEQGYKVSFESASKKEVDKLVEEGKLYMFQIYNKDFSDKSHGTPNLHTMYFKLLFDENNHGQIRLSGGAELFMRRASLKKEELVVHPANSPIANKNPDNPKKTTTLSYDVYKDKRFSEDQYELHIPIAINKCPKNIFKINTEVRVLLKHDDNPYVIGIDRGERNLLYIVVVDGKGNIVEQYSLNEIINNFNGIRIKTDYHSLLDKKEKERFEARQNWTSIENIKELKAGYISQVVHKICELVEKYDAVIALEDLNSGFKNSRVKVEKQVYQKFEKMLIDKLNYMVDKKSNPCATGGALKGYQITNKFESFKSMSTQNGFIFYIPAWLTSKIDPSTGFVNLLKTKYTSIADSKKFISSFDRIMYVPEEDLFEFALDYKNFSRTDADYIKKWKLYSYGNRIRIFRNPKKNNVFDWEEVCLTSAYKELFNKYGINYQQGDIRALLCEQSDKAFYSSFMALMSLMLQMRNSITGRTDVDFLISPVKNSDGIFYDSRNYEAQENAILPKNADANGAYNIARKVLWAIGQFKKAEDEKLDKVKIAISNKEWLEYAQTSVKH

SEQ ID NO: 174 - protein, 1507 aa, synthetic construct
  REGION 1..1507: note = Synthetic scFV::Cas12a fusion
MAGPDIVMTQSPSSLSASVGDRVTITCRSSTGAVTTSNYASWVQEKPGKLFKGLIGGTNNRAPGVPSRFSGSLIGDKATLTISSLQPEDFATYFCALWYSNHWVFGQGTKVELKRGGGGSGGGGSGGGGSSGGGSEVKLLESGGGLVQPGGSLKLSCAVSGFSLTDYGVNWVRQAPGRGLEWIGVIWGDGITDYNSALKDRFIISKDNGKNTVYLQMSKVRSDDTALYYCVTGLFDYWGQGTLVTVSSYPYDVPDYAGSSETPGTSESATPEGGSGGSGSSKLEKFTNCYSLSKTLRFKAIPVGKTQENIDNKRLLVEDEKRAEDYKGVKKLLDRYYLSFINDVLHSIKLKNLNNYISLFRKKTRTEKENKELENLEINLRKEIAKAFKGNEGYKSLFKKDIIETILPEFLDDKDEIALVNSFNGFTTAFTGFFDNRENMFSEEAKSTSIAFRCINENLTRYISNMDIFEKVDAIFDKHEVQEIKEKILNSDYDVEDFFEGEFFNFVLTQEGIDVYNAIIGGFVTESGEKIKGLNEYINLYNQKTKQKLPKFKPLYKQVLSDRESLSFYGEGYTSDEEVLEVFRNTLNKNSEIFSSIKKLEKLFKNFDEYSSAGIFVKNGPAISTISKDIFGEWNVIRDKWNAEYDDIHLKKKAVVTEKYEDDRRKSFKKIGSFSLEQLQEYADADLSVVEKLKEIIIQKVDEIYKVYGSSEKLFDADFVLEKSLKKNDAVVAIMKDLLDSVKSFENYIKAFFGEGKETNRDESFYGDFVLAYDILLKVDHIYDAIRNYVTQKPYSKDKFKLYFQNPQFMGGWDKDKETDYRATILRYGSKYYLAIMDKKYAKCLQKIDKDDVNGNYEKINYKLLPGPNKMLPKVFFSKKWMAYYNPSEDIQKIYKNGTFKKGDMFNLNDCHKLIDFFKDSISRYPKWSNAYDFNFSETEKYKDIAGFYREVEEQGYKVSFESASKKEVDKLVEEGKLYMFQIYNKDFSDKSHGTPNLHTMYFKLLFDENNHGQIRLSGGAELFMRRASLKKEELVVHPANSPIANKNPDNPKKTTTLSYDVYKDKRFSEDQYELHIPIAINKCPKNIFKINTEVRVLLKHDDNPYVIGIDRGERNLLYIVVVDGKGNIVEQYSLNEIINNFNGIRIKTDYHSLLDKKEKERFEARQNWTSIENIKELKAGYISQVVHKICELVEKYDAVIALEDLNSGFKNSRVKVEKQVYQKFEKMLIDKLNYMVDKKSNPCATGGALKGYQITNKFESFKSMSTQNGFIFYIPAWLTSKIDPSTGFVNLLKTKYTSIADSKKFISSFDRIMYVPEEDLFEFALDYKNFSRTDADYIKKWKLYSYGNRIRIFRNPKKNNVFDWEEVCLTSAYKELFNKYGINYQQGDIRALLCEQSDKAFYSSFMALMSLMLQMRNSITGRTDVDFLISPVKNSDGIFYDSRNYEAQENAILPKNADANGAYNIARKVLWAIGQFKKAEDEKLDKVKIAISNKEWLEYAQTSVKH

SEQ ID NO: 175 - protein, 828 aa, synthetic construct
  REGION 1..828: note = Synthetic VirD2::8xGCN4 fusion
MPDRAQVIIRIVPGGGTKTLQQIINQLEYLSRKGRLELQRSARHLDIPLPPDQIHELARSWVQETGTYDESQPDEERQQELTTHIIVSFPAGTSQVAAYAASREWAAEMFGSGAGGGRYNYLTAFHIDRDHPHLHVVVNRRELLGHGWLKISRRHPQLNYDALRIKMAEISLRHGIALDASRRAERGITERPITYAQYRRLEREQARQIRFEDADLEQSSPQGDHPEFSQPFDTSPFEASAGGPEDMPRPNNRQNESQVHLQEPAGVSNEAGVLVRVALETERLAQPFVSETILADDIGSGSSRVAEGRVESANRTPDIPRAATEAATHTTHDRQRRAKRPHDDDGGPSGAKRVTLEGIAVGPQANAGEQDGSSGGSSGGSMSGSKKRRIKQDEELLSKNYHLENEVARLKKGSGSGGSGSGGSGSGSGGSGSGGSGSGEELLSKNYHLENEVARLKKGSGSGGSGSGGSGSGSGGSGSGGSGSGEELLSKNYHLENEVARLKKGSGSGGSGSGGSGSGSGGSGSGGSGSGEELLSKNYHLENEVARLKKGSGSGGSGSGGSGSGSGGSGSGGSGSGEELLSKNYHLENEVARLKKGSGSGGSGSGGSGSGSGGSGSGGSGSGEELLSKNYHLENEVARLKKGSGSGGSGSGGSGSGSGGSGSGGSGSGEELLSKNYHLENEVARLKKGSGSGGSGSGGSGSGSGGSGSGGSGSGEELLSKNYHLENEVARLKKGSKKRRIKQDSGSGGSSGGSSGPLVRQAGTSRPSPPTATTRASTATDSLSATAHLQQRRGVLSKRPREDDDGEPSERKRERDERSKDGRGGNRR

SEQ ID NO: 176 - protein, 1593 aa, synthetic construct
  REGION 1..1593: note = Synthetic Cas12a::8xGCN4 fusion
MASKLEKFTNCYSLSKTLRFKAIPVGKTQENIDNKRLLVEDEKRAEDYKGVKKLLDRYYLSFINDVLHSIKLKNLNNYISLFRKKTRTEKENKELENLEINLRKEIAKAFKGNEGYKSLFKKDIIETILPEFLDDKDEIALVNSFNGFTTAFTGFFDNRENMFSEEAKSTSIAFRCINENLTRYISNMDIFEKVDAIFDKHEVQEIKEKILNSDYDVEDFFEGEFFNFVLTQEGIDVYNAIIGGFVTESGEKIKGLNEYINLYNQKTKQKLPKFKPLYKQVLSDRESLSFYGEGYTSDEEVLEVFRNTLNKNSEIFSSIKKLEKLFKNFDEYSSAGIFVKNGPAISTISKDIFGEWNVIRDKWNAEYDDIHLKKKAVVTEKYEDDRRKSFKKIGSFSLEQLQEYADADLSVVEKLKEIIIQKVDEIYKVYGSSEKLFDADFVLEKSLKKNDAVVAIMKDLLDSVKSFENYIKAFFGEGKETNRDESFYGDFVLAYDILLKVDHIYDAIRNYVTQKPYSKDKFKLYFQNPQFMGGWDKDKETDYRATILRYGSKYYLAIMDKKYAKCLQKIDKDDVNGNYEKINYKLLPGPNKMLPKVFFSKKWMAYYNPSEDIQKIYKNGTFKKGDMFNLNDCHKLIDFFKDSISRYPKWSNAYDFNFSETEKYKDIAGFYREVEEQGYKVSFESASKKEVDKLVEEGKLYMFQIYNKDFSDKSHGTPNLHTMYFKLLFDENNHGQIRLSGGAELFMRRASLKKEELVVHPANSPIANKNPDNPKKTTTLSYDVYKDKRFSEDQYELHIPIAINKCPKNIFKINTEVRVLLKHDDNPYVIGIDRGERNLLYIVVVDGKGNIVEQYSLNEIINNFNGIRIKTDYHSLLDKKEKERFEARQNWTSIENIKELKAGYISQVVHKICELVEKYDAVIALEDLNSGFKNSRVKVEKQVYQKFEKMLIDKLNYMVDKKSNPCATGGALKGYQITNKFESFKSMSTQNGFIFYIPAWLTSKIDPSTGFVNLLKTKYTSIADSKKFISSFDRIMYVPEEDLFEFALDYKNFSRTDADYIKKWKLYSYGNRIRIFRNPKKNNVFDWEEVCLTSAYKELFNKYGINYQQGDIRALLCEQSDKAFYSSFMALMSLMLQMRNSITGRTDVDFLISPVKNSDGIFYDSRNYEAQENAILPKNADANGAYNIARKVLWAIGQFKKAEDEKLDKVKIAISNKEWLEYAQTSVKHGSSETPGTSESATPEGGSGGSGSEELLSKNYHLENEVARLKKGSGSGGSGSGGSGSGSGGSGSGGSGSGEELLSKNYHLENEVARLKKGSGSGGSGSGGSGSGSGGSGSGGSGSGEELLSKNYHLENEVARLKKGSGSGGSGSGGSGSGSGGSGSGGSGSGEELLSKNYHLENEVARLKKGSGSGGSGSGGSGSGSGGSGSGGSGSGEELLSKNYHLENEVARLKKGSGSGGSGSGGSGSGSGGSGSGGSGSGEELLSKNYHLENEVARLKKGSGSGGSGSGGSGSGSGGSGSGGSGSGEELLSKNYHLENEVARLKKGSGSGGSGSGGSGSGSGGSGSGGSGSGEELLSKNYHLENEVARLKK

SEQ ID NO: 177 - protein, 756 aa, synthetic construct
  REGION 1..756: note = Synthetic scFv::VirD2 fusion
MSGSKKRRIKQDGPDIVMTQSPSSLSASVGDRVTITCRSSTGAVTTSNYASWVQEKPGKLFKGLIGGTNNRAPGVPSRFSGSLIGDKATLTISSLQPEDFATYFCALWYSNHWVFGQGTKVELKRGGGGSGGGGSGGGGSSGGGSEVKLLESGGGLVQPGGSLKLSCAVSGFSLTDYGVNWVRQAPGRGLEWIGVIWGDGITDYNSALKDRFIISKDNGKNTVYLQMSKVRSDDTALYYCVTGLFDYWGQGTLVTVSSYPYDVPDYAGSKKRRIKQDSGGSSGGSSGSETPGTSESATPESSGGSSGGSMPDRAQVIIRIVPGGGTKTLQQIINQLEYLSRKGRLELQRSARHLDIPLPPDQIHELARSWVQETGTYDESQPDEERQQELTTHIIVSFPAGTSQVAAYAASREWAAEMFGSGAGGGRYNYLTAFHIDRDHPHLHVVVNRRELLGHGWLKISRRHPQLNYDALRIKMAEISLRHGIALDASRRAERGITERPITYAQYRRLEREQARQIRFEDADLEQSSPQGDHPEFSQPFDTSPFEASAGGPEDMPRPNNRQNESQVHLQEPAGVSNEAGVLVRVALETERLAQPFVSETILADDIGSGSSRVAEGRVESANRTPDIPRAATEAATHTTHDRQRRAKRPHDDDGGPSGAKRVTLEGIAVGPQANAGEQDGSSGPLVRQAGTSRPSPPTATTRASTATDSLSATAHLQQRRGVLSKRPREDDDGEPSERKRERDERSKDGRGGNRR

SEQ ID NO: 178 - protein, 842 aa, synthetic construct
  REGION 1..842: note = Synthetic 8xGCN4::VirD2 fusion
MSGSKKRRIKQDEELLSKNYHLENEVARLKKGSGSGGSGSGGSGSGSGGSGSGGSGSGEELLSKNYHLENEVARLKKGSGSGGSGSGGSGSGSGGSGSGGSGSGEELLSKNYHLENEVARLKKGSGSGGSGSGGSGSGSGGSGSGGSGSGEELLSKNYHLENEVARLKKGSGSGGSGSGGSGSGSGGSGSGGSGSGEELLSKNYHLENEVARLKKGSGSGGSGSGGSGSGSGGSGSGGSGSGEELLSKNYHLENEVARLKKGSGSGGSGSGGSGSGSGGSGSGGSGSGEELLSKNYHLENEVARLKKGSGSGGSGSGGSGSGSGGSGSGGSGSGEELLSKNYHLENEVARLKKGSKKRRIKQDSGGSSGGSSGSETPGTSESATPESSGGSSGGSMPDRAQVIIRIVPGGGTKTLQQIINQLEYLSRKGRLELQRSARHLDIPLPPDQIHELARSWVQETGTYDESQPDEERQQELTTHIIVSFPAGTSQVAAYAASREWAAEMFGSGAGGGRYNYLTAFHIDRDHPHLHVVVNRRELLGHGWLKISRRHPQLNYDALRIKMAEISLRHGIALDASRRAERGITERPITYAQYRRLEREQARQIRFEDADLEQSSPQGDHPEFSQPFDTSPFEASAGGPEDMPRPNNRQNESQVHLQEPAGVSNEAGVLVRVALETERLAQPFVSETILADDIGSGSSRVAEGRVESANRTPDIPRAATEAATHTTHDRQRRAKRPHDDDGGPSGAKRVTLEGIAVGPQANAGEQDGSSGPLVRQAGTSRPSPPTATTRASTATDSLSATAHLQQRRGVLSKRPREDDDGEPSERKRERDERSKDGRGGNRR

SEQ ID NO: 179 - protein, 1507 aa, synthetic construct
  REGION 1..1507: note = Synthetic Cas12a::scFV fusion
MASKLEKFTNCYSLSKTLRFKAIPVGKTQENIDNKRLLVEDEKRAEDYKGVKKLLDRYYLSFINDVLHSIKLKNLNNYISLFRKKTRTEKENKELENLEINLRKEIAKAFKGNEGYKSLFKKDIIETILPEFLDDKDEIALVNSFNGFTTAFTGFFDNRENMFSEEAKSTSIAFRCINENLTRYISNMDIFEKVDAIFDKHEVQEIKEKILNSDYDVEDFFEGEFFNFVLTQEGIDVYNAIIGGFVTESGEKIKGLNEYINLYNQKTKQKLPKFKPLYKQVLSDRESLSFYGEGYTSDEEVLEVFRNTLNKNSEIFSSIKKLEKLFKNFDEYSSAGIFVKNGPAISTISKDIFGEWNVIRDKWNAEYDDIHLKKKAVVTEKYEDDRRKSFKKIGSFSLEQLQEYADADLSVVEKLKEIIIQKVDEIYKVYGSSEKLFDADFVLEKSLKKNDAVVAIMKDLLDSVKSFENYIKAFFGEGKETNRDESFYGDFVLAYDILLKVDHIYDAIRNYVTQKPYSKDKFKLYFQNPQFMGGWDKDKETDYRATILRYGSKYYLAIMDKKYAKCLQKIDKDDVNGNYEKINYKLLPGPNKMLPKVFFSKKWMAYYNPSEDIQKIYKNGTFKKGDMFNLNDCHKLIDFFKDSISRYPKWSNAYDFNFSETEKYKDIAGFYREVEEQGYKVSFESASKKEVDKLVEEGKLYMFQIYNKDFSDKSHGTPNLHTMYFKLLFDENNHGQIRLSGGAELFMRRASLKKEELVVHPANSPIANKNPDNPKKTTTLSYDVYKDKRFSEDQYELHIPIAINKCPKNIFKINTEVRVLLKHDDNPYVIGIDRGERNLLYIVVVDGKGNIVEQYSLNEIINNFNGIRIKTDYHSLLDKKEKERFEARQNWTSIENIKELKAGYISQVVHKICELVEKYDAVIALEDLNSGFKNSRVKVEKQVYQKFEKMLIDKLNYMVDKKSNPCATGGALKGYQITNKFESFKSMSTQNGFIFYIPAWLTSKIDPSTGFVNLLKTKYTSIADSKKFISSFDRIMYVPEEDLFEFALDYKNFSRTDADYIKKWKLYSYGNRIRIFRNPKKNNVFDWEEVCLTSAYKELFNKYGINYQQGDIRALLCEQSDKAFYSSFMALMSLMLQMRNSITGRTDVDFLISPVKNSDGIFYDSRNYEAQENAILPKNADANGAYNIARKVLWAIGQFKKAEDEKLDKVKIAISNKEWLEYAQTSVKHGSSETPGTSESATPEGGSGGSGSGPDIVMTQSPSSLSASVGDRVTITCRSSTGAVTTSNYASWVQEKPGKLFKGLIGGTNNRAPGVPSRFSGSLIGDKATLTISSLQPEDFATYFCALWYSNHWVFGQGTKVELKRGGGGSGGGGSGGGGSSGGGSEVKLLESGGGLVQPGGSLKLSCAVSGFSLTDYGVNWVRQAPGRGLEWIGVIWGDGITDYNSALKDRFIISKDNGKNTVYLQMSKVRSDDTALYYCVTGLFDYWGQGTLVTVSSYPYDVPDYA

SEQ ID NO: 180 - protein, 790 aa, synthetic construct
  REGION 1..790: note = Synthetic VirD2-ScFv-VirF fusion
MPDRAQVIIRIVPGGGTKTLQQIINQLEYLSRKGRLELQRSARHLDIPLPPDQIHELARSWVQETGTYDESQPDEERQQELTTHIIVSFPAGTSQVAAYAASREWAAEMFGSGAGGGRYNYLTAFHIDRDHPHLHVVVNRRELLGHGWLKISRRHPQLNYDALRIKMAEISLRHGIALDASRRAERGITERPITYAQYRRLEREQARQIRFEDADLEQSSPQGDHPEFSQPFDTSPFEASAGGPEDMPRPNNRQNESQVHLQEPAGVSNEAGVLVRVALETERLAQPFVSETILADDIGSGSSRVAEGRVESANRTPDIPRAATEAATHTTHDRQRRAKRPHDDDGGPSGAKRVTLEGIAVGPQANAGEQDGSSGPLVRQAGTSRPSPPTATTRASTATDSLSATAHLQQRRGVLSKRPREDDDGEPSERKRERDERSKDGRGGNRRSGGSSGGSMSGSKKRRIKQDGPDIVMTQSPSSLSASVGDRVTITCRSSTGAVTTSNYASWVQEKPGKLFKGLIGGTNNRAPGVPSRFSGSLIGDKATLTISSLQPEDFATYFCALWYSNHWVFGQGTKVELKRGGGGSGGGGSGGGGSSGGGSEVKLLESGGGLVQPGGSLKLSCAVSGFSLTDYGVNWVRQAPGRGLEWIGVIWGDGITDYNSALKDRFIISKDNGKNTVYLQMSKVRSDDTALYYCVTGLFDYWGQGTLVTVSSYPYDVPDYAGSKKRRIKQDSGGSSGGSSASLARGGPNAVGLLTTNESFEKNINEVYNRTRAELDASSRDRSRSGLSR

SEQ ID NO: 181 - protein, 876 aa, synthetic construct
  REGION 1..876: note = Synthetic VirD2::8xGCN4::VirF fusion
MPDRAQVIIRIVPGGGTKTLQQIINQLEYLSRKGRLELQRSARHLDIPLPPDQIHELARSWVQETGTYDESQPDEERQQELTTHIIVSFPAGTSQVAAYAASREWAAEMFGSGAGGGRYNYLTAFHIDRDHPHLHVVVNRRELLGHGWLKISRRHPQLNYDALRIKMAEISLRHGIALDASRRAERGITERPITYAQYRRLEREQARQIRFEDADLEQSSPQGDHPEFSQPFDTSPFEASAGGPEDMPRPNNRQNESQVHLQEPAGVSNEAGVLVRVALETERLAQPFVSETILADDIGSGSSRVAEGRVESANRTPDIPRAATEAATHTTHDRQRRAKRPHDDDGGPSGAKRVTLEGIAVGPQANAGEQDGSSGPLVRQAGTSRPSPPTATTRASTATDSLSATAHLQQRRGVLSKRPREDDDGEPSERKRERDERSKDGRGGNRRSGGSSGGSMSGSKKRRIKQDEELLSKNYHLENEVARLKKGSGSGGSGSGGSGSGSGGSGSGGSGSGEELLSKNYHLENEVARLKKGSGSGGSGSGGSGSGSGGSGSGGSGSGEELLSKNYHLENEVARLKKGSGSGGSGSGGSGSGSGGSGSGGSGSGEELLSKNYHLENEVARLKKGSGSGGSGSGGSGSGSGGSGSGGSGSGEELLSKNYHLENEVARLKKGSGSGGSGSGGSGSGSGGSGSGGSGSGEELLSKNYHLENEVARLKKGSGSGGSGSGGSGSGSGGSGSGGSGSGEELLSKNYHLENEVARLKKGSGSGGSGSGGSGSGSGGSGSGGSGSGEELLSKNYHLENEVARLKKGSKKRRIKQDSGGSSGGSSASLARGGPNAVGLLTTNESFEKNINEVYNRTRAELDASSRDRSRSGLSR

SEQ ID NO: 182 - protein, 548 aa, synthetic construct; identical to SEQ ID NO: 99
  REGION 1..548: note = Synthetic SH3dom::VirD2 fusion

SEQ ID NO: 183 - protein, 1320 aa, synthetic construct
  REGION 1..1320: note = Synthetic Cas12a::4xSH3lig fusion
MASKLEKFTNCYSLSKTLRFKAIPVGKTQENIDNKRLLVEDEKRAEDYKGVKKLLDRYYLSFINDVLHSIKLKNLNNYISLFRKKTRTEKENKELENLEINLRKEIAKAFKGNEGYKSLFKKDIIETILPEFLDDKDEIALVNSFNGFTTAFTGFFDNRENMFSEEAKSTSIAFRCINENLTRYISNMDIFEKVDAIFDKHEVQEIKEKILNSDYDVEDFFEGEFFNFVLTQEGIDVYNAIIGGFVTESGEKIKGLNEYINLYNQKTKQKLPKFKPLYKQVLSDRESLSFYGEGYTSDEEVLEVFRNTLNKNSEIFSSIKKLEKLFKNFDEYSSAGIFVKNGPAISTISKDIFGEWNVIRDKWNAEYDDIHLKKKAVVTEKYEDDRRKSFKKIGSFSLEQLQEYADADLSVVEKLKEIIIQKVDEIYKVYGSSEKLFDADFVLEKSLKKNDAVVAIMKDLLDSVKSFENYIKAFFGEGKETNRDESFYGDFVLAYDILLKVDHIYDAIRNYVTQKPYSKDKFKLYFQNPQFMGGWDKDKETDYRATILRYGSKYYLAIMDKKYAKCLQKIDKDDVNGNYEKINYKLLPGPNKMLPKVFFSKKWMAYYNPSEDIQKIYKNGTFKKGDMFNLNDCHKLIDFFKDSISRYPKWSNAYDFNFSETEKYKDIAGFYREVEEQGYKVSFESASKKEVDKLVEEGKLYMFQIYNKDFSDKSHGTPNLHTMYFKLLFDENNHGQIRLSGGAELFMRRASLKKEELVVHPANSPIANKNPDNPKKTTTLSYDVYKDKRFSEDQYELHIPIAINKCPKNIFKINTEVRVLLKHDDNPYVIGIDRGERNLLYIVVVDGKGNIVEQYSLNEIINNFNGIRIKTDYHSLLDKKEKERFEARQNWTSIENIKELKAGYISQVVHKICELVEKYDAVIALEDLNSGFKNSRVKVEKQVYQKFEKMLIDKLNYMVDKKSNPCATGGALKGYQITNKFESFKSMSTQNGFIFYIPAWLTSKIDPSTGFVNLLKTKYTSIADSKKFISSFDRIMYVPEEDLFEFALDYKNFSRTDADYIKKWKLYSYGNRIRIFRNPKKNNVFDWEEVCLTSAYKELFNKYGINYQQGDIRALLCEQSDKAFYSSFMALMSLMLQMRNSITGRTDVDFLISPVKNSDGIFYDSRNYEAQENAILPKNADANGAYNIARKVLWAIGQFKKAEDEKLDKVKIAISNKEWLEYAQTSVKHGSSETPGTSESATPEGGSGGSGSPPPALPPKRRRSGGSSGGSPPPALPPKRRRSGGSSGGSPPPALPPKRRRSGGSSGGSPPPALPPKRRR

SEQ ID NO: 184 - protein, 559 aa, synthetic construct
  REGION 1..559: note = Synthetic 4xSH3lig::VirD2 fusion
MSGSKKRRIKQDPPPALPPKRRRSGGSSGGSPPPALPPKRRRSGGSSGGSPPPALPPKRRRSGGSSGGSPPPALPPKRRRSGGSSGGSSGSETPGTSESATPESSGGSSGGSMPDRAQVIIRIVPGGGTKTLQQIINQLEYLSRKGRLELQRSARHLDIPLPPDQIHELARSWVQETGTYDESQPDEERQQELTTHIIVSFPAGTSQVAAYAASREWAAEMFGSGAGGGRYNYLTAFHIDRDHPHLHVVVNRRELLGHGWLKISRRHPQLNYDALRIKMAEISLRHGIALDASRRAERGITERPITYAQYRRLEREQARQIRFEDADLEQSSPQGDHPEFSQPFDTSPFEASAGGPEDMPRPNNRQNESQVHLQEPAGVSNEAGVLVRVALETERLAQPFVSETILADDIGSGSSRVAEGRVESANRTPDIPRAATEAATHTTHDRQRRAKRPHDDDGGPSGAKRVTLEGIAVGPQANAGEQDGSSGPLVRQAGTSRPSPPTATTRASTATDSLSATAHLQQRRGVLSKRPREDDDGEPSERKRERDERSKDGRGGNRR

SEQ ID NO: 185 - protein, 1309 aa, synthetic construct
  REGION 1..1309: note = Synthetic Cas12a::SH3dom fusion
MASKLEKFTNCYSLSKTLRFKAIPVGKTQENIDNKRLLVEDEKRAEDYKGVKKLLDRYYLSFINDVLHSIKLKNLNNYISLFRKKTRTEKENKELENLEINLRKEIAKAFKGNEGYKSLFKKDIIETILPEFLDDKDEIALVNSFNGFTTAFTGFFDNRENMFSEEAKSTSIAFRCINENLTRYISNMDIFEKVDAIFDKHEVQEIKEKILNSDYDVEDFFEGEFFNFVLTQEGIDVYNAIIGGFVTESGEKIKGLNEYINLYNQKTKQKLPKFKPLYKQVLSDRESLSFYGEGYTSDEEVLEVFRNTLNKNSEIFSSIKKLEKLFKNFDEYSSAGIFVKNGPAISTISKDIFGEWNVIRDKWNAEYDDIHLKKKAVVTEKYEDDRRKSFKKIGSFSLEQLQEYADADLSVVEKLKEIIIQKVDEIYKVYGSSEKLFDADFVLEKSLKKNDAVVAIMKDLLDSVKSFENYIKAFFGEGKETNRDESFYGDFVLAYDILLKVDHIYDAIRNYVTQKPYSKDKFKLYFQNPQFMGGWDKDKETDYRATILRYGSKYYLAIMDKKYAKCLQKIDKDDVNGNYEKINYKLLPGPNKMLPKVFFSKKWMAYYNPSEDIQKIYKNGTFKKGDMFNLNDCHKLIDFFKDSISRYPKWSNAYDFNFSETEKYKDIAGFYREVEEQGYKVSFESASKKEVDKLVEEGKLYMFQIYNKDFSDKSHGTPNLHTMYFKLLFDENNHGQIRLSGGAELFMRRASLKKEELVVHPANSPIANKNPDNPKKTTTLSYDVYKDKRFSEDQYELHIPIAINKCPKNIFKINTEVRVLLKHDDNPYVIGIDRGERNLLYIVVVDGKGNIVEQYSLNEIINNFNGIRIKTDYHSLLDKKEKERFEARQNWTSIENIKELKAGYISQVVHKICELVEKYDAVIALEDLNSGFKNSRVKVEKQVYQKFEKMLIDKLNYMVDKKSNPCATGGALKGYQITNKFESFKSMSTQNGFIFYIPAWLTSKIDPSTGFVNLLKTKYTSIADSKKFISSFDRIMYVPEEDLFEFALDYKNFSRTDADYIKKWKLYSYGNRIRIFRNPKKNNVFDWEEVCLTSAYKELFNKYGINYQQGDIRALLCEQSDKAFYSSFMALMSLMLQMRNSITGRTDVDFLISPVKNSDGIFYDSRNYEAQENAILPKNADANGAYNIARKVLWAIGQFKKAEDEKLDKVKIAISNKEWLEYAQTSVKHGSSETPGTSESATPEGGSGGSGSAEYVRALFDFNGNDEEDLPFKKGDILRIRDKPEEQWWNAEDSEGKRGMIPVPYVEKY

SEQ ID NO: 186 - protein, 534 aa, synthetic construct
  REGION 1..534: note = Synthetic VirD2::SH3dom fusion
MPDRAQVIIRIVPGGGTKTLQQIINQLEYLSRKGRLELQRSARHLDIPLPPDQIHELARSWVQETGTYDESQPDEERQQELTTHIIVSFPAGTSQVAAYAASREWAAEMFGSGAGGGRYNYLTAFHIDRDHPHLHVVVNRRELLGHGWLKISRRHPQLNYDALRIKMAEISLRHGIALDASRRAERGITERPITYAQYRRLEREQARQIRFEDADLEQSSPQGDHPEFSQPFDTSPFEASAGGPEDMPRPNNRQNESQVHLQEPAGVSNEAGVLVRVALETERLAQPFVSETILADDIGSGSSRVAEGRVESANRTPDIPRAATEAATHTTHDRQRRAKRPHDDDGGPSGAKRVTLEGIAVGPQANAGEQDGSSGGSSGGSMSGSKKRRIKQDAEYVRALFDFNGNDEEDLPFKKGDILRIRDKPEEQWWNAEDSEGKRGMIPVPYVEKYSGSGGSSGGSSGPLVRQAGTSRPSPPTATTRASTATDSLSATAHLQQRRGVLSKRPREDDDGEPSERKRERDERSKDGRGGNRR

SEQ ID NO: 187 - protein, 1320 aa, synthetic construct
  REGION 1..1320: note = Synthetic 4xSH3lig::Cas12a fusion
MAPPPALPPKRRRSGGSSGGSPPPALPPKRRRSGGSSGGSPPPALPPKRRRSGGSSGGSPPPALPPKRRRGSSETPGTSESATPEGGSGGSGSSKLEKFTNCYSLSKTLRFKAIPVGKTQENIDNKRLLVEDEKRAEDYKGVKKLLDRYYLSFINDVLHSIKLKNLNNYISLFRKKTRTEKENKELENLEINLRKEIAKAFKGNEGYKSLFKKDIIETILPEFLDDKDEIALVNSFNGFTTAFTGFFDNRENMFSEEAKSTSIAFRCINENLTRYISNMDIFEKVDAIFDKHEVQEIKEKILNSDYDVEDFFEGEFFNFVLTQEGIDVYNAIIGGFVTESGEKIKGLNEYINLYNQKTKQKLPKFKPLYKQVLSDRESLSFYGEGYTSDEEVLEVFRNTLNKNSEIFSSIKKLEKLFKNFDEYSSAGIFVKNGPAISTISKDIFGEWNVIRDKWNAEYDDIHLKKKAVVTEKYEDDRRKSFKKIGSFSLEQLQEYADADLSVVEKLKEIIIQKVDEIYKVYGSSEKLFDADFVLEKSLKKNDAVVAIMKDLLDSVKSFENYIKAFFGEGKETNRDESFYGDFVLAYDILLKVDHIYDAIRNYVTQKPYSKDKFKLYFQNPQFMGGWDKDKETDYRATILRYGSKYYLAIMDKKYAKCLQKIDKDDVNGNYEKINYKLLPGPNKMLPKVFFSKKWMAYYNPSEDIQKIYKNGTFKKGDMFNLNDCHKLIDFFKDSISRYPKWSNAYDFNFSETEKYKDIAGFYREVEEQGYKVSFESASKKEVDKLVEEGKLYMFQIYNKDFSDKSHGTPNLHTMYFKLLFDENNHGQIRLSGGAELFMRRASLKKEELVVHPANSPIANKNPDNPKKTTTLSYDVYKDKRFSEDQYELHIPIAINKCPKNIFKINTEVRVLLKHDDNPYVIGIDRGERNLLYIVVVDGKGNIVEQYSLNEIINNFNGIRIKTDYHSLLDKKEKERFEARQNWTSIENIKELKAGYISQVVHKICELVEKYDAVIALEDLNSGFKNSRVKVEKQVYQKFEKMLIDKLNYMVDKKSNPCATGGALKGYQITNKFESFKSMSTQNGFIFYIPAWLTSKIDPSTGFVNLLKTKYTSIADSKKFISSFDRIMYVPEEDLFEFALDYKNFSRTDADYIKKWKLYSYGNRIRIFRNPKKNNVFDWEEVCLTSAYKELFNKYGINYQQGDIRALLCEQSDKAFYSSFMALMSLMLQMRNSITGRTDVDFLISPVKNSDGIFYDSRNYEAQENAILPKNADANGAYNIARKVLWAIGQFKKAEDEKLDKVKIAISNKEWLEYAQTSVKH

SEQ ID NO: 188 - protein, 545 aa, synthetic construct
  REGION 1..545: note = Synthetic VirD2::SH3lig fusion
MPDRAQVIIRIVPGGGTKTLQQIINQLEYLSRKGRLELQRSARHLDIPLPPDQIHELARSWVQETGTYDESQPDEERQQELTTHIIVSFPAGTSQVAAYAASREWAAEMFGSGAGGGRYNYLTAFHIDRDHPHLHVVVNRRELLGHGWLKISRRHPQLNYDALRIKMAEISLRHGIALDASRRAERGITERPITYAQYRRLEREQARQIRFEDADLEQSSPQGDHPEFSQPFDTSPFEASAGGPEDMPRPNNRQNESQVHLQEPAGVSNEAGVLVRVALETERLAQPFVSETILADDIGSGSSRVAEGRVESANRTPDIPRAATEAATHTTHDRQRRAKRPHDDDGGPSGAKRVTLEGIAVGPQANAGEQDGSSGGSSGGSMSGSKKRRIKQDPPPALPPKRRRSGGSSGGSPPPALPPKRRRSGGSSGGSPPPALPPKRRRSGGSSGGSPPPALPPKRRRSGSGGSSGGSSGPLVRQAGTSRPSPPTATTRASTATDSLSATAHLQQRRGVLSKRPREDDDGEPSERKRERDERSKDGRGGNRR

SEQ ID NO: 189 - protein, 1309 aa, synthetic construct
  REGION 1..1309: note = Synthetic SH3dom::Cas12a fusion
MAAEYVRALFDFNGNDEEDLPFKKGDILRIRDKPEEQWWNAEDSEGKRGMIPVPYVEKYGSSETPGTSESATPEGGSGGSGSSKLEKFTNCYSLSKTLRFKAIPVGKTQENIDNKRLLVEDEKRAEDYKGVKKLLDRYYLSFINDVLHSIKLKNLNNYISLFRKKTRTEKENKELENLEINLRKEIAKAFKGNEGYKSLFKKDIIETILPEFLDDKDEIALVNSFNGFTTAFTGFFDNRENMFSEEAKSTSIAFRCINENLTRYISNMDIFEKVDAIFDKHEVQEIKEKILNSDYDVEDFFEGEFFNFVLTQEGIDVYNAIIGGFVTESGEKIKGLNEYINLYNQKTKQKLPKFKPLYKQVLSDRESLSFYGEGYTSDEEVLEVFRNTLNKNSEIFSSIKKLEKLFKNFDEYSSAGIFVKNGPAISTISKDIFGEWNVIRDKWNAEYDDIHLKKKAVVTEKYEDDRRKSFKKIGSFSLEQLQEYADADLSVVEKLKEIIIQKVDEIYKVYGSSEKLFDADFVLEKSLKKNDAVVAIMKDLLDSVKSFENYIKAFFGEGKETNRDESFYGDFVLAYDILLKVDHIYDAIRNYVTQKPYSKDKFKLYFQNPQFMGGWDKDKETDYRATILRYGSKYYLAIMDKKYAKCLQKIDKDDVNGNYEKINYKLLPGPNKMLPKVFFSKKWMAYYNPSEDIQKIYKNGTFKKGDMFNLNDCHKLIDFFKDSISRYPKWSNAYDFNFSETEKYKDIAGFYREVEEQGYKVSFESASKKEVDKLVEEGKLYMFQIYNKDFSDKSHGTPNLHTMYFKLLFDENNHGQIRLSGGAELFMRRASLKKEELVVHPANSPIANKNPDNPKKTTTLSYDVYKDKRFSEDQYELHIPIAINKCPKNIFKINTEVRVLLKHDDNPYVIGIDRGERNLLYIVVVDGKGNIVEQYSLNEIINNFNGIRIKTDYHSLLDKKEKERFEARQNWTSIENIKELKAGYISQVVHKICELVEKYDAVIALEDLNSGFKNSRVKVEKQVYQKFEKMLIDKLNYMVDKKSNPCATGGALKGYQITNKFESFKSMSTQNGFIFYIPAWLTSKIDPSTGFVNLLKTKYTSIADSKKFISSFDRIMYVPEEDLFEFALDYKNFSRTDADYIKKWKLYSYGNRIRIFRNPKKNNVFDWEEVCLTSAYKELFNKYGINYQQGDIRALLCEQSDKAFYSSFMALMSLMLQMRNSITGRTDVDFLISPVKNSDGIFYDSRNYEAQENAILPKNADANGAYNIARKVLWAIGQFKKAEDEKLDKVKIAISNKEWLEYAQTSVKH

SEQ ID NO: 190 - protein, 582 aa, synthetic construct
  REGION 1..582: note = Synthetic VirD2::SH3dom::VirF fusion
MPDRAQVIIRIVPGGGTKTLQQIINQLEYLSRKGRLELQRSARHLDIPLPPDQIHELARSWVQETGTYDESQPDEERQQELTTHIIVSFPAGTSQVAAYAASREWAAEMFGSGAGGGRYNYLTAFHIDRDHPHLHVVVNRRELLGHGWLKISRRHPQLNYDALRIKMAEISLRHGIALDASRRAERGITERPITYAQYRRLEREQARQIRFEDADLEQSSPQGDHPEFSQPFDTSPFEASAGGPEDMPRPNNRQNESQVHLQEPAGVSNEAGVLVRVALETERLAQPFVSETILADDIGSGSSRVAEGRVESANRTPDIPRAATEAATHTTHDRQRRAKRPHDDDGGPSGAKRVTLEGIAVGPQANAGEQDGSSGPLVRQAGTSRPSPPTATTRASTATDSLSATAHLQQRRGVLSKRPREDDDGEPSERKRERDERSKDGRGGNRRSGGSSGGSMSGSKKRRIKQDAEYVRALFDFNGNDEEDLPFKKGDILRIRDKPEEQWWNAEDSEGKRGMIPVPYVEKYSGGSSGGSSASLARGGPNAVGLLTTNESFEKNINEVYNRTRAELDASSRDRSRSGLSR

SEQ ID NO: 191 - protein, 593 aa, synthetic construct
  REGION 1..593: note = Synthetic VirD2::4xSH3lig::VirF fusion
MPDRAQVIIRIVPGGGTKTLQQIINQLEYLSRKGRLELQRSARHLDIPLPPDQIHELARSWVQETGTYDESQPDEERQQELTTHIIVSFPAGTSQVAAYAASREWAAEMFGSGAGGGRYNYLTAFHIDRDHPHLHVVVNRRELLGHGWLKISRRHPQLNYDALRIKMAEISLRHGIALDASRRAERGITERPITYAQYRRLEREQARQIRFEDADLEQSSPQGDHPEFSQPFDTSPFEASAGGPEDMPRPNNRQNESQVHLQEPAGVSNEAGVLVRVALETERLAQPFVSETILADDIGSGSSRVAEGRVESANRTPDIPRAATEAATHTTHDRQRRAKRPHDDDGGPSGAKRVTLEGIAVGPQANAGEQDGSSGPLVRQAGTSRPSPPTATTRASTATDSLSATAHLQQRRGVLSKRPREDDDGEPSERKRERDERSKDGRGGNRRSGGSSGGSMSGSKKRRIKQDPPPALPPKRRRSGGSSGGSPPPALPPKRRRSGGSSGGSPPPALPPKRRRSGGSSGGSPPPALPPKRRRSGGSSGGSSASLARGGPNAVGLLTTNESFEKNINEVYNRTRAELDASSRDRSRSGLSR

SEQ ID NO: 192 - protein, 522 aa, synthetic construct
  REGION 1..522: note = Synthetic C-intein::VirD2 fusion
MSNSTIKIATRKYLGKQNVYDIGVERDHNFALKNGFIASNCFNSGGSSGGSSGSETPGTSESATPESSGGSSGGSMPDRAQVIIRIVPGGGTKTLQQIINQLEYLSRKGRLELQRSARHLDIPLPPDQIHELARSWVQETGTYDESQPDEERQQELTTHIIVSFPAGTSQVAAYAASREWAAEMFGSGAGGGRYNYLTAFHIDRDHPHLHVVVNRRELLGHGWLKISRRHPQLNYDALRIKMAEISLRHGIALDASRRAERGITERPITYAQYRRLEREQARQIRFEDADLEQSSPQGDHPEFSQPFDTSPFEASAGGPEDMPRPNNRQNESQVHLQEPAGVSNEAGVLVRVALETERLAQPFVSETILADDIGSGSSRVAEGRVESANRTPDIPRAATEAATHTTHDRQRRAKRPHDDDGGPSGAKRVTLEGIAVGPQANAGEQDGSSGPLVRQAGTSRPSPPTATTRASTATDSLSATAHLQQRRGVLSKRPREDDDGEPSERKRERDERSKDGRGGNRR

SEQ ID NO: 193 - protein, 1354 aa, synthetic construct
  REGION 1..1354: note = Synthetic Cas12a::N-intein fusion
MASKLEKFTNCYSLSKTLRFKAIPVGKTQENIDNKRLLVEDEKRAEDYKGVKKLLDRYYLSFINDVLHSIKLKNLNNYISLFRKKTRTEKENKELENLEINLRKEIAKAFKGNEGYKSLFKKDIIETILPEFLDDKDEIALVNSFNGFTTAFTGFFDNRENMFSEEAKSTSIAFRCINENLTRYISNMDIFEKVDAIFDKHEVQEIKEKILNSDYDVEDFFEGEFFNFVLTQEGIDVYNAIIGGFVTESGEKIKGLNEYINLYNQKTKQKLPKFKPLYKQVLSDRESLSFYGEGYTSDEEVLEVFRNTLNKNSEIFSSIKKLEKLFKNFDEYSSAGIFVKNGPAISTISKDIFGEWNVIRDKWNAEYDDIHLKKKAVVTEKYEDDRRKSFKKIGSFSLEQLQEYADADLSVVEKLKEIIIQKVDEIYKVYGSSEKLFDADFVLEKSLKKNDAVVAIMKDLLDSVKSFENYIKAFFGEGKETNRDESFYGDFVLAYDILLKVDHIYDAIRNYVTQKPYSKDKFKLYFQNPQFMGGWDKDKETDYRATILRYGSKYYLAIMDKKYAKCLQKIDKDDVNGNYEKINYKLLPGPNKMLPKVFFSKKWMAYYNPSEDIQKIYKNGTFKKGDMFNLNDCHKLIDFFKDSISRYPKWSNAYDFNFSETEKYKDIAGFYREVEEQGYKVSFESASKKEVDKLVEEGKLYMFQIYNKDFSDKSHGTPNLHTMYFKLLFDENNHGQIRLSGGAELFMRRASLKKEELVVHPANSPIANKNPDNPKKTTTLSYDVYKDKRFSEDQYELHIPIAINKCPKNIFKINTEVRVLLKHDDNPYVIGIDRGERNLLYIVVVDGKGNIVEQYSLNEIINNFNGIRIKTDYHSLLDKKEKERFEARQNWTSIENIKELKAGYISQVVHKICELVEKYDAVIALEDLNSGFKNSRVKVEKQVYQKFEKMLIDKLNYMVDKKSNPCATGGALKGYQITNKFESFKSMSTQNGFIFYIPAWLTSKIDPSTGFVNLLKTKYTSIADSKKFISSFDRIMYVPEEDLFEFALDYKNFSRTDADYIKKWKLYSYGNRIRIFRNPKKNNVFDWEEVCLTSAYKELFNKYGINYQQGDIRALLCEQSDKAFYSSFMALMSLMLQMRNSITGRTDVDFLISPVKNSDGIFYDSRNYEAQENAILPKNADANGAYNIARKVLWAIGQFKKAEDEKLDKVKIAISNKEWLEYAQTSVKHGSSETPGTSESATPEGGSGGSGSCLSYETEILTVEYGLLPIGKIVEKRIECTVYSVDNNGNIYTQPVAQWHDRGEQEVFEYCLEDGSLIRATKDHKFMTVDGQMLPIDEIFERELDLMRVDNLPN

SEQ ID NO: 194 - protein, 629 aa, synthetic construct
  REGION 1..629: note = Synthetic VirD2::N-intein::VirF fusion
MPDRAQVIIRIVPGGGTKTLQQIINQLEYLSRKGRLELQRSARHLDIPLPPDQIHELARSWVQETGTYDESQPDEERQQELTTHIIVSFPAGTSQVAAYAASREWAAEMFGSGAGGGRYNYLTAFHIDRDHPHLHVVVNRRELLGHGWLKISRRHPQLNYDALRIKMAEISLRHGIALDASRRAERGITERPITYAQYRRLEREQARQIRFEDADLEQSSPQGDHPEFSQPFDTSPFEASAGGPEDMPRPNNRQNESQVHLQEPAGVSNEAGVLVRVALETERLAQPFVSETILADDIGSGSSRVAEGRVESANRTPDIPRAATEAATHTTHDRQRRAKRPHDDDGGPSGAKRVTLEGIAVGPQANAGEQDGSSGPLVRQAGTSRPSPPTATTRASTATDSLSATAHLQQRRGVLSKRPREDDDGEPSERKRERDERSKDGRGGNRRSGGSSGGSMSGSKKRRIKQDGSCLSYETEILTVEYGLLPIGKIVEKRIECTVYSVDNNGNIYTQPVAQWHDRGEQEVFEYCLEDGSLIRATKDHKFMTVDGQMLPIDEIFERELDLMRVDNLPNSGGSSGGSSASLARGGPNAVGLLTTNESFEKNINEVYNRTRAELDASSRDRSRSGLSR

SEQ ID NO: 195 - protein, 1293 aa, synthetic construct
  REGION 1..1293: note = Synthetic C-intein::Cas12a fusion
MANSTIKIATRKYLGKQNVYDIGVERDHNFALKNGFIASNCFNGSSETPGTSESATPEGGSGGSGSSKLEKFTNCYSLSKTLRFKAIPVGKTQENIDNKRLLVEDEKRAEDYKGVKKLLDRYYLSFINDVLHSIKLKNLNNYISLFRKKTRTEKENKELENLEINLRKEIAKAFKGNEGYKSLFKKDIIETILPEFLDDKDEIALVNSFNGFTTAFTGFFDNRENMFSEEAKSTSIAFRCINENLTRYISNMDIFEKVDAIFDKHEVQEIKEKILNSDYDVEDFFEGEFFNFVLTQEGIDVYNAIIGGFVTESGEKIKGLNEYINLYNQKTKQKLPKFKPLYKQVLSDRESLSFYGEGYTSDEEVLEVFRNTLNKNSEIFSSIKKLEKLFKNFDEYSSAGIFVKNGPAISTISKDIFGEWNVIRDKWNAEYDDIHLKKKAVVTEKYEDDRRKSFKKIGSFSLEQLQEYADADLSVVEKLKEIIIQKVDEIYKVYGSSEKLFDADFVLEKSLKKNDAVVAIMKDLLDSVKSFENYIKAFFGEGKETNRDESFYGDFVLAYDILLKVDHIYDAIRNYVTQKPYSKDKFKLYFQNPQFMGGWDKDKETDYRATILRYGSKYYLAIMDKKYAKCLQKIDKDDVNGNYEKINYKLLPGPNKMLPKVFFSKKWMAYYNPSEDIQKIYKNGTFKKGDMFNLNDCHKLIDFFKDSISRYPKWSNAYDFNFSETEKYKDIAGFYREVEEQGYKVSFESASKKEVDKLVEEGKLYMFQIYNKDFSDKSHGTPNLHTMYFKLLFDENNHGQIRLSGGAELFMRRASLKKEELVVHPANSPIANKNPDNPKKTTTLSYDVYKDKRFSEDQYELHIPIAINKCPKNIFKINTEVRVLLKHDDNPYVIGIDRGERNLLYIVVVDGKGNIVEQYSLNEIINNFNGIRIKTDYHSLLDKKEKERFEARQNWTSIENIKELKAGYISQVVHKICELVEKYDAVIALEDLNSGFKNSRVKVEKQVYQKFEKMLIDKLNYMVDKKSNPCATGGALKGYQITNKFESFKSMSTQNGFIFYIPAWLTSKIDPSTGFVNLLKTKYTSIADSKKFISSFDRIMYVPEEDLFEFALDYKNFSRTDADYIKKWKLYSYGNRIRIFRNPKKNNVFDWEEVCLTSAYKELFNKYGINYQQGDIRALLCEQSDKAFYSSFMALMSLMLQMRNSITGRTDVDFLISPVKNSDGIFYDSRNYEAQENAILPKNADANGAYNIARKVLWAIGQFKKAEDEKLDKVKIAISNKEWLEYAQTSVKH

SEQ ID NO: 196 - protein, 1229 aa, synthetic construct
  REGION 1..1229: note = Synthetic Cas12a-no NLS sequence
MASKLEKFTNCYSLSKTLRFKAIPVGKTQENIDNKRLLVEDEKRAEDYKGVKKLLDRYYLSFINDVLHSIKLKNLNNYISLFRKKTRTEKENKELENLEINLRKEIAKAFKGNEGYKSLFKKDIIETILPEFLDDKDEIALVNSFNGFTTAFTGFFDNRENMFSEEAKSTSIAFRCINENLTRYISNMDIFEKVDAIFDKHEVQEIKEKILNSDYDVEDFFEGEFFNFVLTQEGIDVYNAIIGGFVTESGEKIKGLNEYINLYNQKTKQKLPKFKPLYKQVLSDRESLSFYGEGYTSDEEVLEVFRNTLNKNSEIFSSIKKLEKLFKNFDEYSSAGIFVKNGPAISTISKDIFGEWNVIRDKWNAEYDDIHLKKKAVVTEKYEDDRRKSFKKIGSFSLEQLQEYADADLSVVEKLKEIIIQKVDEIYKVYGSSEKLFDADFVLEKSLKKNDAVVAIMKDLLDSVKSFENYIKAFFGEGKETNRDESFYGDFVLAYDILLKVDHIYDAIRNYVTQKPYSKDKFKLYFQNPQFMGGWDKDKETDYRATILRYGSKYYLAIMDKKYAKCLQKIDKDDVNGNYEKINYKLLPGPNKMLPKVFFSKKWMAYYNPSEDIQKIYKNGTFKKGDMFNLNDCHKLIDFFKDSISRYPKWSNAYDFNFSETEKYKDIAGFYREVEEQGYKVSFESASKKEVDKLVEEGKLYMFQIYNKDFSDKSHGTPNLHTMYFKLLFDENNHGQIRLSGGAELFMRRASLKKEELVVHPANSPIANKNPDNPKKTTTLSYDVYKDKRFSEDQYELHIPIAINKCPKNIFKINTEVRVLLKHDDNPYVIGIDRGERNLLYIVVVDGKGNIVEQYSLNEIINNFNGIRIKTDYHSLLDKKEKERFEARQNWTSIENIKELKAGYISQVVHKICELVEKYDAVIALEDLNSGFKNSRVKVEKQVYQKFEKMLIDKLNYMVDKKSNPCATGGALKGYQITNKFESFKSMSTQNGFIFYIPAWLTSKIDPSTGFVNLLKTKYTSIADSKKFISSFDRIMYVPEEDLFEFALDYKNFSRTDADYIKKWKLYSYGNRIRIFRNPKKNNVFDWEEVCLTSAYKELFNKYGINYQQGDIRALLCEQSDKAFYSSFMALMSLMLQMRNSITGRTDVDFLISPVKNSDGIFYDSRNYEAQENAILPKNADANGAYNIARKVLWAIGQFKKAEDEKLDKVKIAISNKEWLEYAQTSVKH

SEQ ID NO: 197 - protein, 1714 aa, synthetic construct
  REGION 1..1714: note = Synthetic VirD2::Cas12a fusion
MPDRAQVIIRIVPGGGTKTLQQIINQLEYLSRKGRLELQRSARHLDIPLPPDQIHELARSWVQETGTYDESQPDEERQQELTTHIIVSFPAGTSQVAAYAASREWAAEMFGSGAGGGRYNYLTAFHIDRDHPHLHVVVNRRELLGHGWLKISRRHPQLNYDALRIKMAEISLRHGIALDASRRAERGITERPITYAQYRRLEREQARQIRFEDADLEQSSPQGDHPEFSQPFDTSPFEASAGGPEDMPRPNNRQNESQVHLQEPAGVSNEAGVLVRVALETERLAQPFVSETILADDIGSGSSRVAEGRVESANRTPDIPRAATEAATHTTHDRQRRAKRPHDDDGGPSGAKRVTLEGIAVGPQANAGEQDGSSGGSSGGSMSGSKKRRIKQDSKLEKFTNCYSLSKTLRFKAIPVGKTQENIDNKRLLVEDEKRAEDYKGVKKLLDRYYLSFINDVLHSIKLKNLNNYISLFRKKTRTEKENKELENLEINLRKEIAKAFKGNEGYKSLFKKDIIETILPEFLDDKDEIALVNSFNGFTTAFTGFFDNRENMFSEEAKSTSIAFRCINENLTRYISNMDIFEKVDAIFDKHEVQEIKEKILNSDYDVEDFFEGEFFNFVLTQEGIDVYNAIIGGFVTESGEKIKGLNEYINLYNQKTKQKLPKFKPLYKQVLSDRESLSFYGEGYTSDEEVLEVFRNTLNKNSEIFSSIKKLEKLFKNFDEYSSAGIFVKNGPAISTISKDIFGEWNVIRDKWNAEYDDIHLKKKAVVTEKYEDDRRKSFKKIGSFSLEQLQEYADADLSVVEKLKEIIIQKVDEIYKVYGSSEKLFDADFVLEKSLKKNDAVVAIMKDLLDSVKSFENYIKAFFGEGKETNRDESFYGDFVLAYDILLKVDHIYDAIRNYVTQKPYSKDKFKLYFQNPQFMGGWDKDKETDYRATILRYGSKYYLAIMDKKYAKCLQKIDKDDVNGNYEKINYKLLPGPNKMLPKVFFSKKWMAYYNPSEDIQKIYKNGTFKKGDMFNLNDCHKLIDFFKDSISRYPKWSNAYDFNFSETEKYKDIAGFYREVEEQGYKVSFESASKKEVDKLVEEGKLYMFQIYNKDFSDKSHGTPNLHTMYFKLLFDENNHGQIRLSGGAELFMRRASLKKEELVVHPANSPIANKNPDNPKKTTTLSYDVYKDKRFSEDQYELHIPIAINKCPKNIFKINTEVRVLLKHDDNPYVIGIDRGERNLLYIVVVDGKGNIVEQYSLNEIINNFNGIRIKTDYHSLLDKKEKERFEARQNWTSIENIKELKAGYISQVVHKICELVEKYDAVIALEDLNSGFKNSRVKVEKQVYQKFEKMLIDKLNYMVDKKSNPCATGGALKGYQITNKFESFKSMSTQNGFIFYIPAWLTSKIDPSTGFVNLLKTKYTSIADSKKFISSFDRIMYVPEEDLFEFALDYKNFSRTDADYIKKWKLYSYGNRIRIFRNPKKNNVFDWEEVCLTSAYKELFNKYGINYQQGDIRALLCEQSDKAFYSSFMALMSLMLQMRNSITGRTDVDFLISPVKNSDGIFYDSRNYEAQENAILPKNADANGAYNIARKVLWAIGQFKKAEDEKLDKVKIAISNKEWLEYAQTSVKHGSKKRRIKQDSGSGGSSGGSSGPLVRQAGTSRPSPPTATTRASTATDSLSATAHLQQRRGVLSKRPREDDDGEPSERKRERDERSKDGRGGNRR

SEQ ID NO: 198 - DNA, 1100 bp, synthetic construct
  misc_feature 1..1100: note = Synthetic a2 rt-pr
  source 1..1100: mol_type = other DNA
cttatttgttgattctgtggccatagattaggattttttttcacgaaattgcttcttgaaattacgtgatggattttgattctgatttatcttgtgattgttgactctacagatgcagatcttcgtcaagaccctcaccggaaagaccatcacccttgaggtggaaagctctgacaccatcgacaacgtcaaggccaagatccaggacaaggaaggaattcccccggatcagcaacgtctcatcttcgccggaaagcagctcgaggacggccgtaccctcgccgactacaacatccagaaggagtcaacccttcaccttgtccttcgtctccgtggtggcatgcagatcttcgtcaagactctcactggcaaaaccataaccctagaggtcgaaagctctgacaccattgacaacgtcaaggccaagatccaggacaaggagggaatccccccagaccagcaacgtctcatcttcgccggaaagcaacttgaggacgggcgcaccctcgccgactacaacatccagaaggaatcaacccttcacctcgtcctccgtctccgtggtggcatgcagatcttcgttaagaccctcaccggcaagactataaccctagaagtcgagagctccgacaccatcgacaacgtcaaggctaagatccaggacaaggagggtatccccccagaccagcagaggctgatcttcgccggcaagcagctcgaggacggacgtacccttgctgactacaacatccagaaggagtcaactctccacttggtgttgcgtcttcgtggtggtatgcagatcttcgtcaagacccttacgggtaagactattaccctcgaggtggagagctccgacaccattgacaatgtgaaggcgaagatccaggacaaggaaggaatcccaccggaccagcagaggcttatttttgctggcaaacagctagaggatggaaggaccctcgctgactacaacatccagaaggagtcaactctgcacttggtgttgcgtcttcgtggggggttttcaaatgctgctgatgaagtggcaactcaattactgaattttgacctcttgaagcttgccggtgatgttgagt

SEQ ID NO: 199 - DNA, 1139 bp, synthetic construct
  misc_feature 1..1139: note = Synthetic D3 RT-PCR
  source 1..1139: mol_type = other DNA
cttatttgttgattctgtggccatagattaggattttttttcacgaaattgcttcttgaaattacgtgatggattttgattctgatttatcttgtgattgttgactctacagatgcagatcttcgtcaagaccctcaccggaaagaccatcacccttgaggtggaaagctctgacaccatcgacaacgtcaaggccaagatccaggacaaggaaggaattcccccggatcagcaacgtctcatcttcgccggaaagcagctcgaggacggccgtaccctcgccgactacaacatccagaaggagtcaacccttcaccttgtccttcgtctccgtggtggcatgcagatcttcgtcaagactctcactggcaaaaccataaccctagaggtcgaaagctctgacaccattgacaacgtcaaggccaagatccaggacaaggagggaatccccccagaccagcaacgtctcatcttcgccggaaagcaacttgaggacgggcgcaccctcgccgactacaacatccagaaggaatcaacccttcacctcgtcctccgtctccgtggtggcatgcagatcttcgttaagaccctcaccggcaagactataaccctagaagtcgagagctccgacaccatcgacaacgtcaaggctaagatccaggacaaggagggtatccccccagaccagcagaggctgatcttcgccggcaagcagctcgaggacggacgtacccttgctgactacaacatccagaaggagtcaactctccacttggtgttgcgtcttcgtggtggtatgcagatcttcgtcaagacccttacgggtaagactattaccctcgaggtggagagctccgacaccattgacaatgtgaaggcgaagatccaggacaaggaaggaatcccaccggaccagcagaggcttatttttgctggcaaacagctagaggatggaaggaccctcgctgactacaacatccagaaggagtcaactctgcacttggtgttgcgtcttcgtggggggttttcaaatgctgctgatgaagtggcaactcaattactgaattttgacctcttgaagcttgccggtgatgttgagtctaaccctggaccaatggcgcaagttagcagaatctgca

SEQ ID NO: 200 - DNA, 1131 bp, synthetic construct
  misc_feature 1..1131: note = Synthetic F3 RT-PCR
  misc_feature 5: note = n is a, c, g, or t
  misc_feature 12..13: note = n is a, c, g, or t
  misc_feature 44: note = n is a, c, g, or t
  misc_feature 633: note = n is a, c, g, or t
  misc_feature 636: note = n is a, c, g, or t
  misc_feature 830: note = n is a, c, g, or t
  misc_feature 982..983: note = n is a, c, g, or t
  misc_feature 1018: note = n is a, c, g, or t
  misc_feature 1066..1067: note = n is a, c, g, or t
  misc_feature 1082: note = n is a, c, g, or t
  misc_feature 1105..1106: note = n is a, c, g, or t
  misc_feature 1115..1116: note = n is a, c, g, or t
  misc_feature 1123: note = n is a, c, g, or t
  source 1..1131: mol_type = other DNA
cgtangttgttnnttctgtggccatagattaggattttttttcncgaaattgcttcttgaaattacgtgatggattttgattctgatttatcttgtgattgttgactctacagatgcagatcttcgtcaagaccctcaccggaaagaccatcacccttgaggtggaaagctctgacaccatcgacaacgtcaaggccaagatccaggacaaggaaggaattcccccggatcagcaacgtctcatcttcgccggaaagcagctcgaggacggccgtaccctcgccgactacaacatccagaaggagtcaacccttcaccttgtccttcgtctccgtggtggcatgcagatcttcgtcaagactctcactggcaaaaccataaccctagaggtcgaaagctctgacaccattgacaacgtcaaggccaagatccaggacaaggagggaatccccccagaccagcaacgtctcatcttcgccggaaagcaacttgaggacgggcgcaccctcgccgactacaacatccagaaggaatcaacccttcacctcgtcctccgtctccgtggtggcatgcagatcttcgttaagaccctcaccggcaagactataaccctagaagtcgagagctccgacnccntcgacaacgtcaaggctaagatccaggacaaggagggtatccccccagaccagcagaggctgatcttcgccggcaagcagctcgaggacggacgtacccttgctgactacaacatccagaaggagtcaactctccacttggtgttgcgtcttcgtggtggtatgcagatcttcgtcaagacccttacgggtaanactattaccctcgaggtggagagctccgacaccattgacaatgtgaaggcgaagatccaggacaaggaaggaatcccaccggaccggcagaggcttatttttgctggcaaacagctagaggatggaaggaccctcgctgactacaacatccnnaaggagtcaactctgcacttggtgttgcgtcttcntggggggttttcaaatgctgctgatgaagtggcaactcaattactganntttgacctcttgaancttgccggtgatgttgagtctanncctggaccnntggcgcnagttagca

SEQ ID NO: 201 - DNA, 29 bp, synthetic construct
  misc_feature 1..29: note = Synthetic PM10281
  source 1..29: mol_type = other DNA
cttggacaagaagaagatcgcttggcctc

SEQ ID NO: 202 - DNA, 32 bp, synthetic construct
  misc_feature 1..32: note = Synthetic PM10282
  source 1..32: mol_type = other DNA
cgccaacacaacaatttaactctgggaggaac

SEQ ID NO: 203 - DNA, 1107 bp, synthetic construct
  misc_feature 1..1107: note = Synthetic A2 Left flank
  misc_feature 655: note = n is a, c, g, or t
  source 1..1107: mol_type = other DNA
cttatttgttgattctgtggccatagattaggattttttttcacgaaattgcttcttgaaattacgtgatggattttgattctgatttatcttgtgattgttgactctacagatgcagatcttcgtcaagaccctcaccggaaagaccatcacccttgaggtggaaagctctgacaccatcgacaacgtcaaggccaagatccaggacaaggaaggaattcccccggatcagcaacgtctcatcttcgccggaaagcagctcgaggacggccgtaccctcgccgactacaacatccagaaggagtcaacccttcaccttgtccttcgtctccgtggtggcatgcagatcttcgtcaagactctcactggcaaaaccataaccctagaggtcgaaagctctgacaccattgacaacgtcaaggccaaagatccaggacaaggagggaatccccccagaccagcaacgtctcatcttcgccggaaagcaacttgaggacgggcgcaccctcgccgactacaacatccagaaggaatcaacccttcacctcgtcctccgtctccgtggtggcatgcagatcttcgttaagaccctcaccggcaagactataaccctagaagtcgagagctccgacaccatcgacaacgtcaaggctangatccaggacaaggagggtatccccccagaccagcagaggctgatcttcgccggcaagcagctcgaggacggacgtacccttgctgactacaacatccagaaggagtcaactctccacttggtgttgcgtcttcgtggtggtatgcagatcttcgtcaagacccttacgggtaagactattaccctcgaggtggagagctccgacaccattgacaatgtgaaggcgaagatccaggacaaggaaggaatcccaccggaccagcagaggcttatttttgctggcaaacagctagaggatggaaggaccctcgctgactacaacatccagaaggagtcaactctgcacttggtgttgcgtcttcgtggggggttttcaaatgctgctgatgaagtggcaactcaattactgaattttgacctcttgaagcttgccggtgatgttgagtctaacc

SEQ ID NO: 204 - DNA, 1253 bp, synthetic construct
  misc_feature 1..1253: note = Synthetic A2 Right flank
  misc_feature 965: note = n is a, c, g, or t
  misc_feature 980: note = n is a, c, g, or t
  source 1..1253: mol_type = other DNA
ctacgtgaaaggcgagatcaccaaggtagtcggcaaataagctggagctgatgtctgtgtgatgtctgatgttggattttcccagacattttaagaagaaatgtgatgtgtaatgggtctgtaatgacctttgaaaataagtttggtttgtgttgaactctattgtcccattaatgttactactgtttgttatcaatttgtggagctgatatataattatcaactgtatgctggcatattgtgtttgaattttgttctcaatccagtgaattggcgtatattagtgggttttttattcttcatgcttatcacggaggaaaagcagggatgagttgtgtgaaggatggtgatcatcccacgaattattagattttggtattataggttaaagatatttattaggtagggagaactcttggattagattctaaagtgatattttgaaaacacaccaaaggatttttgaacaaacggagatcatgatccctagtttcaattagctgccccttaccaagaggtagcaacttaaaaattatgctcgtgaagcatatttggtatcgtatataaattatgtaagcaatctgcttcagttggaacattaattggcttgcggaatgcacatttagatgatccacacaggtccacataaaaattcctaatcaattttagttatgcaatctttctgcttcaggtagtccttgtcttacagaaagcacattgagatgatccccacacagatccacataaaaaattcctaatcaataataacttgaaaatcattaaaagatgtaatgccatactaatccctaatttttgtgcaagtttttgtatactggaccccaaaaaataccaaaaagaaaaaacaagttattcagtgatatttttctgctccaatataaatttgattaccaaataccaaaaaataaaaacactattcagtggtatttttctgctccaatactggnccccaaattaatcanaatcggatccgtttaacagataaaaacaaagcgatcgggttaaaatcccatttttacaaataacaacgcaggtttatacatgaaacaaatgtcattaccaagtgatatttttctgctccgatataaatttgattacaacgaaaaaaagtggtctactcacatgtttctccattttacttgtgtataaaactcatttcaagttgtatctgattcgtcgaaaaaacaaaacagaatagtaatactctataccctttttatcatcattaatttgta

SEQ ID NO: 205 - DNA, 653 bp, synthetic construct
  misc_feature 1..653: note = Synthetic A7 Right flank
  misc_feature 646: note = n is a, c, g, or t
  source 1..653: mol_type = other DNA
aaataacaacgcaggtttatacatgaaacaaatgtcattaccaagtgatatttttctgctccgatataaatttgattacaacgaaaaaaagtggtctactcacatgtttctccattttacttgtgtataaaactcatttcaagttgtatctgattcgtcgaaaaaacaaaacagaatagtaatactctataccctttttatcatcattaatttgtatttttgtatactggaccccaaaaaataccaaaaagaaaaaacaagttattcagtgatatttttctgctccaatataaatttgattaccaaataccaaaaaataaaaacactattcagtggtatttttctgctccaatactggaccccaaattaatcagaatcggatccgtttaacagataaaaacaaaagcgatcgggttaaaatcccatttttacaaataacaacgcaggtttatacatgaaacaaatgtcattaccaagtgatatttttctgctccgatataaatttgattacaacgaaaaaaagtggtctactcacatgtttctccattttacttgtgtataaaactcatttcaagttgtatctgattcgtcgaaaaaacaaaacagaatagtaatactctataccctttttatcatcattaatttngtaatta

SEQ ID NO: 206 - DNA, 687 bp, synthetic construct
  misc_feature 1..687: note = Synthetic B2 Left flank
  misc_feature 430: note = n is a, c, g, or t
  source 1..687: mol_type = other DNA
tttttgtatactggaccccaaaaaataccaaaaagaaaaaacaagttattcagtgatatttttctgctccaatataaatttgattaccaaataccaaaaaataaaaacactattcagtggtatttttctgctccaatactggaccccaaattaatcagaatcggatccgtttaacagataaaaacaaaagcgatcgggttaaaatcccatttttacaaataacaacgcaggtttatacatgaaacaaatgtcattaccaagtgatatttttctgctccgatataaatttgattacaacgaaaaaaagtggtctactcacatgtttctccattttacttgtgtataaaactcatttcaagttgtatctgattcgtcgaaaaaacaaaacagaatagtaatactctataccctttttatcatcattaatttngtaattaggacaaggaaggaatcccaccggaccagcagaggcttatttttgctggcaaacagctagaggatggaaggaccctcgctgactacaacatccagaaggagtcaactctgcacttggtgttgcgtcttcgtggggggttttcaaatgctgctgatgaagtggcaactcaattactgaattttgacctcttgaagcttgccggtgatgttgagtctaaccctggaccaatggcgcaagttagcagaatctgc

SEQ ID NO: 207 - DNA, 1260 bp, synthetic construct
  misc_feature 1..1260: note = Synthetic B2 Right flank
  misc_feature 1251: note = n is a, c, g, or t
  source 1..1260: mol_type = other DNA
tacgtgaaaggcgagatcaccaaggtagtcggcaaataagctggagctgatgtctgtgtgatgtctgatgttggattttcccagacattttaagaagaaatgtgatgtgtaatgggtctgtaatgacctttgaaaataagtttggtttgtgttgaactctattgtcccattaatgttactactgtttgttatcaatttgtggagctgatatataattatcaactgtatgctggcatattgtgtttgaattttgttctcaatccagtgaattggcgtatattagtgggttttttattcttcatgcttatcacggaggaaaagcagggatgagttgtgtgaaggatggtgatcatcccacgaattattagattttggtattataggttaaagatatttattaggtagggagaactcttggattagattctaaagtgatattttgaaaacacaccaaaggatttttgaacaaacggagatcatgatccctagtttcaattagctgccccttaccaagaggtagcaacttaaaaattatgctcgtgaagcatatttggtatcgtatataaattatgtaagcaatctgcttcagttggaacattaattggcttgcggaatgcacatttagatgatccacacaggtccacataaaaattcctaatcaattttagttatgcaatctttctgcttcaggtagtccttgtcttacagaaagcacattgagatgatccccacacagatccacataaaaaattcctaatcaataataacttgaaaatcattaaaagatgtaatgccatactaatccctaatttttgtgcaagtttttgtatactggaccccaaaaaataccaaaaagaaaaaacaagttattcagtgatatttttctgctccaatataaatttgattaccaaataccaaaaaataaaaacactattcagtggtatttttctgctccaatactggaccccaaattaatcagaatcggatccgtttaacagataaaaacaaaagcgatcgggttaaaatcccatttttacaaataacaacgcaggtttatacatgaaacaaatgtcattaccaagtgatatttttctgctccgatataaatttgattacaacgaaaaaaagtggtctactcacatgtttctccattttacttgtgtataaaactcatttcaagttgtatctgattcgtcgaaaaaacaaaacagaatagtaatactctataccctttttatcatcattaatttngtaattata

SEQ ID NO: 208 - DNA, 1255 bp, synthetic construct
  misc_feature 1..1255: note = Synthetic B4 Right flank
  misc_feature 1251: note = n is a, c, g, or t
  source 1..1255: mol_type = other DNA
tacgtgaaaggcgagatcaccaaggtagtcggcaaataagctggagctgatgtctgtgtgatgtctgatgttggattttcccagacattttaagaagaaatgtgatgtgtaatgggtctgtaatgacctttgaaaataagtttggtttgtgttgaactctattgtcccattaatgttactactgtttgttatcaatttgtggagctgatatataattatcaactgtatgctggcatattgtgtttgaattttgttctcaatccagtgaattggcgtatattagtgggttttttattcttcatgcttatcacggaggaaaagcagggatgagttgtgtgaaggatggtgatcatcccacgaattattagattttggtattataggttaaagatatttattaggtagggagaactcttggattagattctaaagtgatattttgaaaacacaccaaaggatttttgaacaaacggagatcatgatccctagtttcaattagctgccccttaccaagaggtagcaacttaaaaattatgctcgtgaagcatatttggtatcgtatataaattatgtaagcaatctgcttcagttggaacattaattggcttgcggaatgcacatttagatgatccacacaggtccacataaaaattcctaatcaattttagttatgcaatctttctgcttcaggtagtccttgtcttacagaaagcacattgagatgatccccacacagatccacataaaaaattcctaatcaataataacttgaaaatcattaaaagatgtaatgccatactaatccctaatttttgtgcaagtttttgtatactggaccccaaaaaataccaaaaagaaaaaacaagttattcagtgatatttttctgctccaatataaatttgattaccaaataccaaaaaataaaaacactattcagtggtatttttctgctccaatactggaccccaaattaatcagaatcggatccgtttaacagataaaaacaaaagcgatcgggttaaaatcccatttttacaaataacaacgcaggtttatacatgaaacaaatgtcattaccaagtgatatttttctgctccgatataaatttgattacaacgaaaaaaagtggtctactcacatgtttctccattttacttgtgtataaaactcatttcaagttgtatctgattcgtcgaaaaaacaaaacagaatagtaatactctataccctttttatcatcattaatttngtaa

SEQ ID NO: 209 - DNA, 835 bp, synthetic construct
  misc_feature 1..835: note = Synthetic C2 Left flank
  source 1..835: mol_type = other DNA
ttgattctgtggccatagattaggattttttttcacgaaattgcttcttgaaattacgtgatggattttgattctgatttatcttgtgattgttgactctacagatgcagatcttcgtcaagaccctcaccggaaagaccatcacccttgaggtggaaagctctgacaccatcgacaacgtcaaggccaagatccaggacaaggaaggaattcccccggatcagcaacgtctcatcttcgccggaaagcagctcgaggacggccgtaccctcgccgactacaacatccagaaggagtcaacccttcaccttgtccttcgtctccgtggtggcatgcagatcttcgtcaagactctcactggcaaaaccataaccctagaggtcgaaagctctgacaccattgacaacgtcaaggccaagatccaggacaaggagggaatccccccagaccagcaacgtctcatcttcgccggaaagcaacttgaggacgggcgcaccctcgccgactacaacatccagaaggaatcaacccttcacctcgtcctccgtctccgtggtggcatgcagatcttcgttaagaccctcaccggcaagactataaccctagaagtcgagagctccgacaccatcgacaacgtcaaggctaagatccaggacaaggagggtatccccccagaccagcagaggctgatcttcgccggcaagcagctcgaggacggacgtacccttgctgactacaacatccagaaggagtcaactctccacttggtgttgcgtcttcgtggtggtatgcagatcttcgtcaagacccttacgggtaagactattaccctcga

SEQ ID NO: 210 - DNA, 1250 bp, synthetic construct
  misc_feature 1..1250: note = Synthetic C2 Right flank
  misc_feature 82: note = n is a, c, g, or t
  misc_feature 694: note = n is a, c, g, or t
  source 1..1250: mol_type = other DNA
tacgtgaaaggcgagatcaccaaggtagtcggcaaataagctggagctgatgtctgtgtgatgtctgatgttggattttccnagacattttaagaagaaatgtgatgtgtaatgggtctgtaatgacctttgaaaataagtttggtttgtgttgaactctattgtcccattaatgttactactgtttgttatcaatttgtggagctgatatataattatcaactgtatgctggcatattgtgtttgaattttgttctcaatccagtgaattggcgtatattagtgggttttttattcttcatgcttatcacggaggaaaagcagggatgagttgtgtgaaggatggtgatcatcccacgaattattagattttggtattataggttaaagatatttattaggtagggagaactcttggattagattctaaagtgatattttgaaaacacaccaaaggatttttgaacaaacggagatcatgatccctagtttcaattagctgccccttaccaagaggtagcaacttaaaaattatgctcgtgaagcatatttggtatcgtatataaattatgtaagcaatctgcttcagttggaacattaattggcttgcggaatgcacatttagatgatccacacaggtccacataaaaattcctaatcaattttagttatgcaatctttctgcttcaggtantccttgtcttacagaaagcacattgagatgatccccacacagatccacataaaaaattcctaatcaataataacttgaaaatcattaaaagatgtaatgccatactaatccctaatttttgtgcaagtttttgtatactggaccccaaaaaataccaaaaagaaaaaacaagttattcagtgatatttttctgctccaatataaatttgattaccaaataccaaaaaataaaaacactattcagtggtatttttctgctccaatactggaccccaaattaatcagaatcggatccgtttaacagataaaaacaaaagcgatcgggttaaaatcccatttttacaaataacaacgcaggtttatacatgaaacaaatgtcattaccaagtgatatttttctgctccgatataaatttgattacaacgaaaaaaagtggtctactcacatgtttctccattttacttgtgtataaaactcatttcaagttgtatctgattcgtcgaaaaaacaaaacagaatagtaatactctataccctttttatcatcattaattt

SEQ ID NO: 211 - DNA, 1264 bp, synthetic construct
  misc_feature 1..1264: note = Synthetic E6 Right flank
  misc_feature 6: note = n is a, c, g, or t
  misc_feature 15: note = n is a, c, g, or t
  source 1..1264: mol_type = other DNA
ttgganatttgtccntacgtgaaaggcgagatcaccaaggtagtcggcaaataagctggagctgatgtctgtgtgatgtctgatgttggattttcccagacattttaagaagaaatgtgatgtgtaatgggtctgtaatgacctttgaaaataagtttggtttgtgttgaactctattgtcccattaatgttactactgtttgttatcaatttgtggagctgatatataattatcaactgtatgctggcatattgtgtttgaattttgttctcaatccagtgaattggcgtatattagtgggttttttattcttcatgcttatcacggaggaaaagcagggatgagttgtgtgaaggatggtgatcatcccacgaattattagattttggtattataggttaaagatatttattaggtagggagaactcttggattagattctaaagtgatattttgaaaacacaccaaaggatttttgaacaaacggagatcatgatccctagtttcaattagctgccccttaccaagaggtagcaacttaaaaattatgctcgtgaagcatatttggtatcgtatataaattatgtaagcaatctgcttcagttggaacattaattggcttgcggaatgcacatttagatgatccacacaggtccacataaaaattcctaatcaattttagttatgcaatctttctgcttcaggtagtccttgtcttacagaaagcacattgagatgatccccacacagatccacataaaaaattcctaatcaataataacttgaaaatcattaaaagatgtaatgccatactaatccctaatttttgtgcaagtttttgtatactggaccccaaaaaataccaaaaagaaaaaacaagttattcagtgatatttttctgctccaatataaatttgattaccaaataccaaaaaataaaaacactattcagtggtatttttctgctccaatactggaccccaaattaatcagaatcggatccgtttaacagataaaaacaaaagcgatcgggttaaaatcccatttttacaaataacaacgcaggtttatacatgaaacaaatgtcattaccaagtgatatttttctgctccgatataaatttgattacaacgaaaaaaagtggtctactcacatgtttctccattttacttgtgtataaaactcatttcaagttgtatctgattcgtcgaaaaaacaaaacagaatagtaatactctataccctttttatcatcattaatt

SEQ ID NO: 212 - DNA, 1254 bp, synthetic construct
  misc_feature 1..1254: note = Synthetic G7 Right flank
  source 1..1254: mol_type = other DNA
tacgtgaaaggcgagatcaccaaggtagtcggcaaataagctggagctgatgtctgtgtgatgtctgatgttggattttcccagacattttaagaagaaatgtgatgtgtaatgggtctgtaatgacctttgaaaataagtttggtttgtgttgaactctattgtcccattaatgttactactgtttgttatcaatttgtggagctgatatataattatcaactgtatgctggcatattgtgtttgaattttgttctcaatccagtgaattggcgtatattagtgggttttttattcttcatgcttatcacggaggaaaagcagggatgagttgtgtgaaggatggtgatcatcccacgaattattagattttggtattataggttaaagatatttattaggtagggagaactcttggattagattctaaagtgatattttgaaaacacaccaaaggatttttgaacaaacggagatcatgatccctagtttcaattagctgccccttaccaagaggtagcaacttaaaaattatgctcgtgaagcatatttggtatcgtatataaattatgtaagcaatctgcttcagttggaacattaattggcttgcggaatgcacatttagatgatccacacaggtccacataaaaattcctaatcaattttagttatgcaatctttctgcttcaggtagtccttgtcttacagaaagcacattgagatgatccccacacagatccacataaaaaattcctaatcaataataacttgaaaatcattaaaagatgtaatgccatactaatccctaatttttgtgcaagtttttgtatactggaccccaaaaaataccaaaaagaaaaaacaagttattcagtgatatttttctgctccaatataaatttgattaccaaataccaaaaaataaaaacactattcagtggtatttttctgctccaatactggaccccaaattaatcagaatcggatccgtttaacagataaaaacaaaagcgatcgggttaaaatcccatttttacaaataacaacgcaggtttatacatgaaacaaatgtcattaccaagtgatatttttctgctccgatataaatttgattacaacgaaaaaaagtggtctactcacatgtttctccattttacttgtgtataaaactcatttcaagttgtatctgattcgtcgaaaaaacaaaacagaatagtaatactctataccctttttatcatcattaatttgtaa

SEQ ID NO: 213 - DNA, 1255 bp, synthetic construct; identical to SEQ ID NO: 208
  misc_feature 1..1255: note = Synthetic G8 Right flank
  misc_feature 1251: note = n is a, c, g, or t
  source 1..1255: mol_type = other DNA

SEQ ID NO: 214 - DNA, 912 bp, synthetic construct
  misc_feature 1..912: note = Synthetic G7RT-PCR
  source 1..912: mol_type = other DNA
ccttatttgttgattctgtggccatagattaggattttttttcacgaaattgcttcttgaaattacgtgatggattttgattctgatttatcttgtgattgttgactctacagatgcagatcttcgtcaagaccctcaccggaaagaccatcacccttgaggtggaaagctctgacaccatcgacaacgtcaaggccaagatccaggacaaggaaggaattcccccggatcagcaacgtctcatcttcgccggaaagcagctcgaggacggccgtaccctcgccgactacaacatccagaaggaatcaacccttcacctcgtcctccgtctccgtggtggcatgcagatcttcgttaagaccctcaccggcaagactataaccctagaagtcgagagctccgacaccatcgacaacgtcaaggctaagatccaggacaaggagggtatccccccagaccagcagaggctgatcttcgccggcaagcagctcgaggacggacgtacccttgctgactacaacatccagaaggagtcaactctccacttggtgttgcgtcttcgtggtggtatgcagatcttcgtcaagacccttacgggtaagactattaccctcgaggtggagagctccgacaccattgacaatgtgaaggcgaagatccaggacaaggaaggaatcccaccggaccagcagaggcttatttttgctggcaaacagctagaggatggaaggaccctcgctgactacaacatccagaaggagtcaactctgcacttggtgttgcgtcttcgtggggggttttcaaatgctgctgatgaagtggcaactcaattactgaattttgacctcttgaagcttgccggtgatgttgagtctaaccctggaccaatggcgcaagttagcagaatctgca

SEQ ID NO: 215 - DNA, 889 bp, synthetic construct
  misc_feature 1..889: note = Synthetic B3 Left Flank
  misc_feature 211..212: note = n is a, c, g, or t
  misc_feature 214: note = n is a, c, g, or t
  source 1..889: mol_type = other DNA
ctttagcaactaccttatttgttgattctgtggccatagattaggatttttttcacgaaattgcttcttgaaattacgtgatggattttgattctgatttatcttgtgattgttgactctacagatgcagatcttcgtcaagaccctcaccggaaagaccatcacccttgaggtggaaagctctgacaccatcgacaacgtcaaggccaanntncaggacaaggaaggaattcccccggatcagcaacgtctcatcttcgccggaaagcagctcgaggacggccgtaccctcgccgactacaacatccagaaggaatcaacccttcacctcgtcctccgtctccgtggtggcatgcagatcttcgttaagaccctcaccggcaagactataaccctagaagtcgagagctccgacaccatcgacaacgtcaaggctaagatccaggacaaggagggtatccccccagaccagcagaggctgatcttcgccggcaagcagctcgaggacggacgtacccttgctgactacaacatccagaaggagtcaactctccacttggtgttgcgtcttcgtggtggtatgcagatcttcgtcaagacccttacgggtaagactattaccctcgaggtggagagctccgacaccattgacaatgtgaaggcgaagatccaggacaaggaaggaatcccaccggaccagcagaggcttatttttgctggcaaacagctagaggatggaaggaccctcgctgactacaacatccagaaggagtcaactctgcacttggtgttgcgtcttcgtggggggttttcaaatgctgctgatgaagtggcaactcaattactgaattttgacctcttgaagcttgccggtgatgtgagtctaacc

SEQ ID NO: 216 - DNA, 890 bp, synthetic construct
  misc_feature 1..890: note = Synthetic B6 Left Flank
  source 1..890: mol_type = other DNA
ctttagcaactaccttatttgttgattctgtggccatagattaggatttttttcacgaaattgcttcttgaaattacgtgatggattttgattctgatttatcttgtgattgttgactctacagatgcagatcttcgtcaagaccctcaccggaaagaccatcacccttgaggtggaaagctctgacaccatcgacaacgtcaaggcccaagatccaggacaaggaaggaattcccccggatcagcaacgtctcatcttcgccggaaagcagctcgaggacggccgtaccctcgccgactacaacatccagaaggaatcaacccttcacctcgtcctccgtctccgtggtggcatgcagatcttcgttaagaccctcaccggcaagactataaccctagaagtcgagagctccgacaccatcgacaacgtcaaggctaagatccaggacaaggagggtatccccccagaccagcagaggctgatcttcgccggcaagcagctcgaggacggacgtacccttgctgactacaacatccagaaggagtcaactctccacttggtgttgcgtcttcgtggtggtatgcagatcttcgtcaagacccttacgggtaagactattaccctcgaggtggagagctccgacaccattgacaatgtgaaggcgaagatccaggacaaggaaggaatcccaccggaccagcagaggcttatttttgctggcaaacagctagaggatggaaggaccctcgctgactacaacatccagaaggagtcaactctgcacttggtgttgcgtcttcgtggggggttttcaaatgctgctgatgaagtggcaactcaattactgaattttgacctcttgaagcttgccggtgatgtgagtctaacc

SEQ ID NO: 217 - DNA, 897 bp, synthetic construct
  misc_feature 1..897: note = Synthetic E9 Left Flank
  misc_feature 887: note = n is a, c, g, or t
  misc_feature 891: note = n is a, c, g, or t
  source 1..897: mol_type = other DNA
ctttagcaactaccttatttgttgattctgtggccatagattaggatttttttcacgaaattgcttcttgaaattacgtgatggattttgattctgatttatcttgtgattgttgactctacagatgcagatcttcgtcaagaccctcaccggaaagaccatcacccttgaggtggaaagctctgacaccatcgacaacgtcaaggccaaagatccaggacaaggaaggaattcccccggatcagcaacgtctcatcttcgccggaaagcagctcgaggacggccgtaccctcgccgactacaacatccagaaggaatcaacccttcacctcgtcctccgtctccgtggtggcatgcagatcttcgttaagaccctcaccggcaagactataaccctagaagtcgagagctccgacaccatcgacaacgtcaaggctaagatccaggacaaggagggtatccccccagaccagcagaggctgatcttcgccggcaagcagctcgaggacggacgtacccttgctgactacaacatccagaaggagtcaactctccacttggtgttgcgtcttcgtggtggtatgcagatcttcgtcaagacccttacgggtaagactattaccctcgaggtggagagctccgacaccattgacaatgtgaaggcgaagatccaggacaaggaaggaatcccaccggaccagcagaggcttatttttgctggcaaacagctagaggatggaaggaccctcgctgactacaacatccagaaggagtcaactctgcacttggtgttgcgtcttcgtggggggttttcaaatgctgctgatgaagtggcaactcaattactgaattttgacctcttgaagcttgccggtgatgtgagtctnaccngaccaa

SEQ ID NO: 218 - DNA, 892 bp, synthetic construct
  misc_feature 1..892: note = Synthetic F9 Left flank
  misc_feature 3: note = n is a, c, g, or t
  misc_feature 12: note = n is a, c, g, or t
  misc_feature 14: note = n is a, c, g, or t
  misc_feature 16: note = n is a, c, g, or t
  misc_feature 891: note = n is a, c, g, or t
  source 1..892: mol_type = other DNA
ctntagcaactncntnatttgttgattctgtggccatagattaggatttttttcacgaaattgcttcttgaaattacgtgatggattttgattctgatttatcttgtgattgttgactctacagatgcagatcttcgtcaagaccctcaccggaaagaccatcacccttgaggtggaaagctctgacaccatcgacaacgtcaaggccaagatccaggacaaggaaggaattcccccggatcagcaacgtctcatcttcgccggaaagcagctcgaggacggccgtaccctcgccgactacaacatccagaaggaatcaacccttcacctcgtcctccgtctccgtggtggcatgcagatcttcgttaagaccctcaccggcaagactataaccctagaagtcgagagctccgacaccatcgacaacgtcaaggctaagatccaggacaaggagggtatccccccagaccagcagaggctgatcttcgccggcaagcagctcgaggacggacgtacccttgctgactacaacatccagaaggagtcaactctccacttggtgttgcgtcttcgtggtggtatgcagatcttcgtcaagacccttacgggtaagactattaccctcgaggtggagagctccgacaccattgacaatgtgaaggcgaagatccaggacaaggaaggaatcccaccggaccagcagaggcttatttttgctggcaaacagctagaggatggaaggaccctcgctgactacaacatccagaaggagtcaactctgcacttggtgttgcgtcttcgtggggggttttcaaatgctgctgatgaagtggcaactcaattactgaattttgacctcttgaagcttgccggtgatgtgagtctaacccng

SEQ ID NO: 219 - DNA, 889 bp, synthetic construct
  misc_feature 1..889: note = Synthetic G2 Left flank
  misc_feature 211..214: note = n is a, c, g, or t
  source 1..889: mol_type = other DNA
ctttagcaactaccttatttgttgattctgtggccatagattaggatttttttcacgaaattgcttcttgaaattacgtgatggattttgattctgatttatcttgtgattgttgactctacagatgcagatcttcgtcaagaccctcaccggaaagaccatcacccttgaggtggaaagctctgacaccatcgacaacgtcaaggccaannnncaggacaaggaaggaattcccccggatcagcaacgtctcatcttcgccggaaagcagctcgaggacggccgtaccctcgccgactacaacatccagaaggaatcaacccttcacctcgtcctccgtctccgtggtggcatgcagatcttcgttaagaccctcaccggcaagactataaccctagaagtcgagagctccgacaccatcgacaacgtcaaggctaagatccaggacaaggagggtatccccccagaccagcagaggctgatcttcgccggcaagcagctcgaggacggacgtacccttgctgactacaacatccagaaggagtcaactctccacttggtgttgcgtcttcgtggtggtatgcagatcttcgtcaagacccttacgggtaagactattaccctcgaggtggagagctccgacaccattgacaatgtgaaggcgaagatccaggacaaggaaggaatcccaccggaccagcagaggcttatttttgctggcaaacagctagaggatggaaggaccctcgctgactacaacatccagaaggagtcaactctgcacttggtgttgcgtcttcgtggggggttttcaaatgctgctgatgaagtggcaactcaattactgaattttgacctcttgaagcttgccggtgatgtgagtctaacc

SEQ ID NO: 220 - DNA, 890 bp, synthetic construct
  misc_feature 1..890: note = Synthetic G7 Left flank
  misc_feature 211..213: note = n is a, c, g, or t
  misc_feature 877..879: note = n is a, c, g, or t
  source 1..890: mol_type = other DNA
ctttagcaactaccttatttgttgattctgtggccatagattaggatttttttcacgaaattgcttcttgaaattacgtgatggattttgattctgatttatcttgtgattgttgactctacagatgcagatcttcgtcaagaccctcaccggaaagaccatcacccttgaggtggaaagctctgacaccatcgacaacgtcaaggccaannnccaggacaaggaaggaattcccccggatcagcaacgtctcatcttcgccggaaagcagctcgaggacggccgtaccctcgccgactacaacatccagaaggaatcaacccttcacctcgtcctccgtctccgtggtggcatgcagatcttcgttaagaccctcaccggcaagactataaccctagaagtcgagagctccgacaccatcgacaacgtcaaggctaagatccaggacaaggagggtatccccccagaccagcagaggctgatcttcgccggcaagcagctcgaggacggacgtacccttgctgactacaacatccagaaggagtcaactctccacttggtgttgcgtcttcgtggtggtatgcagatcttcgtcaagacccttacgggtaagactattaccctcgaggtggagagctccgacaccattgacaatgtgaaggcgaagatccaggacaaggaaggaatcccaccggaccagcagaggcttatttttgctggcaaacagctagaggatggaaggaccctcgctgactacaacatccagaaggagtcaactctgcacttggtgttgcgtcttcgtggggggttttcaaatgctgctgatgaagtggcaactcaattactgaattttgacctcttgaagcttgccggtgannngagtctaaccc

SEQ ID NO: 221 - DNA, 4101 bp, synthetic construct
  misc_feature 1..4101: note = Synthetic Cas9
  source 1..4101: mol_type = other DNA
gacaagaagtacagcatcggcctggacatcggcaccaactctgtgggctgggccgtgatcaccgacgagtacaaggtgcccagcaagaaattcaaggtgctgggcaacaccgaccggcacagcatcaagaagaacctgatcggagccctgctgttcgacagcggcgaaacagccgaggccacccggctgaagagaaccgccagaagaagatacaccagacggaagaaccggatctgctatctgcaagagatcttcagcaacgagatggccaaggtggacgacagcttcttccacagactggaagagtccttcctggtggaagaggataagaagcacgagcggcaccccatcttcggcaacatcgtggacgaggtggcctaccacgagaagtaccccaccatctaccacctgagaaagaaactggtggacagcaccgacaaggccgacctgcggctgatctatctggccctggcccacatgatcaagttccggggccacttcctgatcgagggcgacctgaaccccgacaacagcgacgtggacaagctgttcatccagctggtgcagacctacaaccagctgttcgaggaaaaccccatcaacgccagcggcgtggacgccaaggccatcctgtctgccagactgagcaagagcagacggctggaaaatctgatcgcccagctgcccggcgagaagaagaatggcctgttcggaaacctgattgccctgagcctgggcctgacccccaacttcaagagcaacttcgacctggccgaggatgccaaactgcagctgagcaaggacacctacgacgacgacctggacaacctgctggcccagatcggcgaccagtacgccgacctgtttctggccgccaagaacctgtccgacgccatcctgctgagcgacatcctgagagtgaacaccgagatcaccaaggcccccctgagcgcctctatgatcaagagatacgacgagcaccaccaggacctgaccctgctgaaagctctcgtgcggcagcagctgcctgagaagtacaaagagattttcttcgaccagagcaagaacggctacgccggctacattgacggcggagccagccaggaagagttctacaagttcatcaagcccatcctggaaaagatggacggcaccgaggaactgctcgtgaagctgaacagagaggacctgctgcggaagcagcggaccttcgacaacggcagcatcccccaccagatccacctgggagagctgcacgccattctgcggcggcaggaagatttttacccattcctgaaggacaaccgggaaaagatcgagaagatcctgaccttccgcatcccctactacgtgggccctctggccaggggaaacagcagattcgcctggatgaccagaaagagcgaggaaaccatcaccccctggaacttcgaggaagtggtggacaagggcgcttccgcccagagcttcatcgagcggatgaccaacttcgataagaacctgcccaacgagaaggtgctgcccaagcacagcctgctgtacgagtacttcaccgtgtataacgagctgaccaaagtgaaatacgtgaccgagggaatgagaaagcccgccttcctgagcggcgagcagaaaaaggccatcgtggacctgctgttcaagaccaaccggaaagtgaccgtgaagcagctgaaagaggactacttcaagaaaatcgagtgcttcgactccgtggaaatctccggcgtggaagatcggttcaacgcctccctgggcacataccacgatctgctgaaaattatcaaggacaaggacttcctggacaatgaggaaaacgaggacattctggaagatatcgtgctgaccctgacactgtttgaggacagagagatgatcgaggaacggctgaaaacctatgcccacctgttcgacgacaaagtgatgaagcagctgaagcggcggagatacaccggctggggcaggctgagccggaagctgatcaacggcatccgggacaagcagtccggcaagacaatcctggatttcctgaagtccgacggcttcgccaacagaaacttcatgcagctgatccacgacgacagcctgacctttaaagaggacatccagaaagcccaggtgtccggccagggcgatagcctgcacgagcacattgccaatctggccggcagccccgccattaagaagggcatcctgcagacagtgaaggtggtggacgagctcgtgaaagtgatgggccggcacaagcccgagaacatcgtgatcgaaatggccagagagaaccagaccacccagaagggacagaagaacagccgcgagagaatgaagcggatcgaagagggcatcaaagagctgggcagccagatcctgaaagaacaccccgtggaaaacacccagctgcagaacgagaagctgtacctgtactacctgcagaatgggcgggatatgtacgtggaccaggaactggacatcaaccggctgtccgactacgatgtggaccatatcgtgcctcagagctttctgaaggacgactccatcgacaacaaggtgctgaccagaagcgacaagaaccggggcaagagcgacaacgtgccctccgaagaggtcgtgaagaagatgaagaactactggcggcagctgctgaacgccaagctgattacccagagaaagttcgacaatctgaccaaggccgagagaggcggcctgagcgaactggataaggccggcttcatcaagagacagctggtggaaacccggcagatcacaaagcacgtggcacagatcctggactcccggatgaacactaagtacgacgagaatgacaagctgatccgggaagtgaaagtgatcaccctgaagtccaagctggtgtccgatttccggaaggatttccagttttacaaagtgcgcgagatcaacaactaccaccacgcccacgacgcctacctgaacgccgtcgtgggaaccgccctgatcaaaaagtaccctaagctggaaagcgagttcgtgtacggcgactacaaggtgtacgacgtgcggaagatgatcgccaagagcgagcaggaaatcggcaaggctaccgccaagtacttcttctacagcaacatcatgaactttttcaagaccgagattaccctggccaacggcgagatccggaagcggcctctgatcgagacaaacggcgaaaccggggagatcgtgtgggataagggccgggattttgccaccgtgcggaaagtgctgagcatgccccaagtgaatatcgtgaaaaagaccgaggtgcagacaggcggcttcagcaaagagtctatcctgcccaagaggaacagcgataagctgatcgccagaaagaaggactgggaccctaagaagtacggcggcttcgacagccccaccgtggcctattctgtgctggtggtggccaaagtggaaaagggcaagtccaagaaactgaagagtgtgaaagagctgctggggatcaccatcatggaaagaagcagcttcgagaagaatcccatcgactttctggaagccaagggctacaaagaagtgaaaaaggacctgatcatcaagctgcctaagtactccctgttcgagctggaaaacggccggaagagaatgctggcctctgccggcgaactgcagaagggaaacgaactggccctgccctccaaatatgtgaacttcctgtacctggccagccactatgagaagctgaagggctcccccgaggataatgagcagaaacagctgtttgtggaacagcacaagcactacctggacgagatcatcgagcagatcagcgagttctccaagagagtgatcctggccgacgctaatctggacaaagtgctgtccgcctacaacaagcaccgggataagcccatcagagagcaggccgagaatatcatccacctgtttaccctgaccaatctgggagcccctgccgccttcaagtactttgacaccaccatcgaccggaagaggtacaccagcaccaaagaggtgctggacgccaccctgatccaccagagcatcaccggcctgtacgagacacggatcgacctgtctcagctgggaggtgac

SEQ ID NO: 222 - DNA, 4101 bp, synthetic construct
  misc_feature 1..4101: note = Synthetic eCas9
  source 1..4101: mol_type = other DNA
gacaagaagtacagcatcggcctggacatcggcaccaactctgtgggctgggccgtgatcaccgacgagtacaaggtgcccagcaagaaattcaaggtgctgggcaacaccgaccggcacagcatcaagaagaacctgatcggagccctgctgttcgacagcggcgaaacagccgaggccacccggctgaagagaaccgccagaagaagatacaccagacggaagaaccggatctgctatctgcaagagatcttcagcaacgagatggccaaggtggacgacagcttcttccacagactggaagagtccttcctggtggaagaggataagaagcacgagcggcaccccatcttcggcaacatcgtggacgaggtggcctaccacgagaagtaccccaccatctaccacctgagaaagaaactggtggacagcaccgacaaggccgacctgcggctgatctatctggccctggcccacatgatcaagttccggggccacttcctgatcgagggcgacctgaaccccgacaacagcgacgtggacaagctgttcatccagctggtgcagacctacaaccagctgttcgaggaaaaccccatcaacgccagcggcgtggacgccaaggccatcctgtctgccagactgagcaagagcagacggctggaaaatctgatcgcccagctgcccggcgagaagaagaatggcctgttcggaaacctgattgccctgagcctgggcctgacccccaacttcaagagcaacttcgacctggccgaggatgccaaactgcagctgagcaaggacacctacgacgacgacctggacaacctgctggcccagatcggcgaccagtacgccgacctgtttctggccgccaagaacctgtccgacgccatcctgctgagcgacatcctgagagtgaacaccgagatcaccaaggcccccctgagcgcctctatgatcaagagatacgacgagcaccaccaggacctgaccctgctgaaagctctcgtgcggcagcagctgcctgagaagtacaaagagattttcttcgaccagagcaagaacggctacgccggctacattgacggcggagccagccaggaagagttctacaagttcatcaagcccatcctggaaaagatggacggcaccgaggaactgctcgtgaagctgaacagagaggacctgctgcggaagcagcggaccttcgacaacggcagcatcccccaccagatccacctgggagagctgcacgccattctgcggcggcaggaagatttttacccattcctgaaggacaaccgggaaaagatcgagaagatcctgaccttccgcatcccctactacgtgggccctctggccaggggaaacagcagattcgcctggatgaccagaaagagcgaggaaaccatcaccccctggaacttcgaggaagtggtggacaagggcgcttccgcccagagcttcatcgagcggatgaccaacttcgataagaacctgcccaacgagaaggtgctgcccaagcacagcctgctgtacgagtacttcaccgtgtataacgagctgaccaaagtgaaatacgtgaccgagggaatgagaaagcccgccttcctgagcggcgagcagaaaaaggccatcgtggacctgctgttcaagaccaaccggaaagtgaccgtgaagcagctgaaagaggactacttcaagaaaatcgagtgcttcgactccgtggaaatctccggcgtggaagatcggttcaacgcctccctgggcacataccacgatctgctgaaaattatcaaggacaaggacttcctggacaatgaggaaaacgaggacattctggaagatatcgtgctgaccctgacactgtttgaggacagagagatgatcgaggaacggctgaaaacctatgcccacctgttcgacgacaaagtgatgaagcagctgaagcggcggagatacaccggctggggcaggctgagccggaagctgatcaacggcatccgggacaagcagtccggcaagacaatcctggatttcctgaagtccgacggcttcgccaacagaaacttcatgcagctgatccacgacgacagcctgacctttaaagaggacatccagaaagcccaggtgtccggccagggcgatagcctgcacgagcacattgccaatctggccggcagccccgccattaagaagggcatcctgcagacagtgaaggtggtggacgagctcgtgaaagtgatgggccggcacaagcccgagaacatcgtgatcgaaatggccagagagaaccagaccacccagaagggacagaagaacagccgcgagagaatgaagcggatcgaagagggcatcaaagagctgggcagccagatcctgaaagaacaccccgtggaaaacacccagctgcagaacgagaagctgtacctgtactacctgcagaatgggcgggatatgtacgtggaccaggaactggacatcaaccggctgtccgactacgatgtggaccatatcgtgcctcagagctttctggccgacgactccatcgacaacaaggtgctgaccagaagcgacaagaaccggggcaagagcgacaacgtgccctccgaagaggtcgtgaagaagatgaagaactactggcggcagctgctgaacgccaagctgattacccagagaaagttcgacaatctgaccaaggccgagagaggcggcctgagcgaactggataaggccggcttcatcaagagacagctggtggaaacccggcagatcacaaagcacgtggcacagatcctggactcccggatgaacactaagtacgacgagaatgacaagctgatccgggaagtgaaagtgatcaccctgaagtccaagctggtgtccgatttccggaaggatttccagttttacaaagtgcgcgagatcaacaactaccaccacgcccacgacgcctacctgaacgccgtcgtgggaaccgccctgatcaaaaagtaccctgccctggaaagcgagttcgtgtacggcgactacaaggtgtacgacgtgcggaagatgatcgccaagagcgagcaggaaatcggcaaggctaccgccaagtacttcttctacagcaacatcatgaactttttcaagaccgagattaccctggccaacggcgagatccggaaggcccctctgatcgagacaaacggcgaaaccggggagatcgtgtgggataagggccgggattttgccaccgtgcggaaagtgctgagcatgccccaagtgaatatcgtgaaaaagaccgaggtgcagacaggcggcttcagcaaagagtctatcctgcccaagaggaacagcgataagctgatcgccagaaagaaggactgggaccctaagaagtacggcggcttcgacagccccaccgtggcctattctgtgctggtggtggccaaagtggaaaagggcaagtccaagaaactgaagagtgtgaaagagctgctggggatcaccatcatggaaagaagcagcttcgagaagaatcccatcgactttctggaagccaagggctacaaagaagtgaaaaaggacctgatcatcaagctgcctaagtactccctgttcgagctggaaaacggccggaagagaatgctggcctctgccggcgaactgcagaagggaaacgaactggccctgccctccaaatatgtgaacttcctgtacctggccagccactatgagaagctgaagggctcccccgaggataatgagcagaaacagctgtttgtggaacagcacaagcactacctggacgagatcatcgagcagatcagcgagttctccaagagagtgatcctggccgacgctaatctggacaaagtgctgtccgcctacaacaagcaccgggataagcccatcagagagcaggccgagaatatcatccacctgtttaccctgaccaatctgggagcccctgccgccttcaagtactttgacaccaccatcgaccggaagaggtacaccagcaccaaagaggtgctggacgccaccctgatccaccagagcatcaccggcctgtacgagacacggatcgacctgtctcagctgggaggtgac

SEQ ID NO: 223 - DNA, 4101 bp, synthetic construct
  misc_feature 1..4101: note = Synthetic nCas9(D10A)
  source 1..4101: mol_type = other DNA
gacaagaagtacagcatcggcctggccatcggcaccaactctgtgggctgggccgtgatcaccgacgagtacaaggtgcccagcaagaaattcaaggtgctgggcaacaccgaccggcacagcatcaagaagaacctgatcggagccctgctgttcgacagcggcgaaacagccgaggccacccggctgaagagaaccgccagaagaagatacaccagacggaagaaccggatctgctatctgcaagagatcttcagcaacgagatggccaaggtggacgacagcttcttccacagactggaagagtccttcctggtggaagaggataagaagcacgagcggcaccccatcttcggcaacatcgtggacgaggtggcctaccacgagaagtaccccaccatctaccacctgagaaagaaactggtggacagcaccgacaaggccgacctgcggctgatctatctggccctggcccacatgatcaagttccggggccacttcctgatcgagggcgacctgaaccccgacaacagcgacgtggacaagctgttcatccagctggtgcagacctacaaccagctgttcgaggaaaaccccatcaacgccagcggcgtggacgccaaggccatcctgtctgccagactgagcaagagcagacggctggaaaatctgatcgcccagctgcccggcgagaagaagaatggcctgttcggaaacctgattgccctgagcctgggcctgacccccaacttcaagagcaacttcgacctggccgaggatgccaaactgcagctgagcaaggacacctacgacgacgacctggacaacctgctggcccagatcggcgaccagtacgccgacctgtttctggccgccaagaacctgtccgacgccatcctgctgagcgacatcctgagagtgaacaccgagatcaccaaggcccccctgagcgcctctatgatcaagagatacgacgagcaccaccaggacctgaccctgctgaaagctctcgtgcggcagcagctgcctgagaagtacaaagagattttcttcgaccagagcaagaacggctacgccggctacattgacggcggagccagccaggaagagttctacaagttcatcaagcccatcctggaaaagatggacggcaccgaggaactgctcgtgaagctgaacagagaggacctgctgcggaagcagcggaccttcgacaacggcagcatcccccaccagatccacctgggagagctgcacgccattctgcggcggcaggaagatttttacccattcctgaaggacaaccgggaaaagatcgagaagatcctgaccttccgcatcccctactacgtgggccctctggccaggggaaacagcagattcgcctggatgaccagaaagagcgaggaaaccatcaccccctggaacttcgaggaagtggtggacaagggcgcttccgcccagagcttcatcgagcggatgaccaacttcgataagaacctgcccaacgagaaggtgctgcccaagcacagcctgctgtacgagtacttcaccgtgtataacgagctgaccaaagtgaaatacgtgaccgagggaatgagaaagcccgccttcctgagcggcgagcagaaaaaggccatcgtggacctgctgttcaagaccaaccggaaagtgaccgtgaagcagctgaaagaggactacttcaagaaaatcgagtgcttcgactccgtggaaatctccggcgtggaagatcggttcaacgcctccctgggcacataccacgatctgctgaaaattatcaaggacaaggacttcctggacaatgaggaaaacgaggacattctggaagatatcgtgctgaccctgacactgtttgaggacagagagatgatcgaggaacggctgaaaacctatgcccacctgttcgacgacaaagtgatgaagcagctgaagcggcggagatacaccggctggggcaggctgagccggaagctgatcaacggcatccgggacaagcagtccggcaagacaatcctggatttcctgaagtccgacggcttcgccaacagaaacttcatgcagctgatccacgacgacagcctgacctttaaagaggacatccagaaagcccaggtgtccggccagggcgatagcctgcacgagcacattgccaatctggccggcagccccgccattaagaagggcatcctgcagacagtgaaggtggtggacgagctcgtgaaagtgatgggccggcacaagcccgagaacatcgtgatcgaaatggccagagagaaccagaccacccagaagggacagaagaacagccgcgagagaatgaagcggatcgaagagggcatcaaagagctgggcagccagatcctgaaagaacaccccgtggaaaacacccagctgcagaacgagaagctgtacctgtactacctgcagaatgggcgggatatgtacgtggaccaggaactggacatcaaccggctgtccgactacgatgtggaccatatcgtgcctcagagctttctgaaggacgactccatcgacaacaaggtgctgaccagaagcgacaagaaccggggcaagagcgacaacgtgccctccgaagaggtcgtgaagaagatgaagaactactggcggcagctgctgaacgccaagctgattacccagagaaagttcgacaatctgaccaaggccgagagaggcggcctgagcgaactggataaggccggcttcatcaagagacagctggtggaaacccggcagatcacaaagcacgtggcacagatcctggactcccggatgaacactaagtacgacgagaatgacaagctgatccgggaagtgaaagtgatcaccctgaagtccaagctggtgtccgatttccggaaggatttccagttttacaaagtgcgcgagatcaacaactaccaccacgcccacgacgcctacctgaacgccgtcgtgggaaccgccctgatcaaaaagtaccctaagctggaaagcgagttcgtgtacggcgactacaaggtgtacgacgtgcggaagatgatcgccaagagcgagcaggaaatcggcaaggctaccgccaagtacttcttctacagcaacatcatgaactttttcaagaccgagattaccctggccaacggcgagatccggaagcggcctctgatcgagacaaacggcgaaaccggggagatcgtgtgggataagggccgggattttgccaccgtgcggaaagtgctgagcatgccccaagtgaatatcgtgaaaaagaccgaggtgcagacaggcggcttcagcaaagagtctatcctgcccaagaggaacagcgataagctgatcgccagaaagaaggactgggaccctaagaagtacggcggcttcgacagccccaccgtggcctattctgtgctggtggtggccaaagtggaaaagggcaagtccaagaaactgaagagtgtgaaagagctgctggggatcaccatcatggaaagaagcagcttcgagaagaatcccatcgactttctggaagccaagggctacaaagaagtgaaaaaggacctgatcatcaagctgcctaagtactccctgttcgagctggaaaacggccggaagagaatgctggcctctgccggcgaactgcagaagggaaacgaactggccctgccctccaaatatgtgaacttcctgtacctggccagccactatgagaagctgaagggctcccccgaggataatgagcagaaacagctgtttgtggaacagcacaagcactacctggacgagatcatcgagcagatcagcgagttctccaagagagtgatcctggccgacgctaatctggacaaagtgctgtccgcctacaacaagcaccgggataagcccatcagagagcaggccgagaatatcatccacctgtttaccctgaccaatctgggagcccctgccgccttcaagtactttgacaccaccatcgaccggaagaggtacaccagcaccaaagaggtgctggacgccaccctgatccaccagagcatcaccggcctgtacgagacacggatcgacctgtctcagctgggaggtgac

SEQ ID NO: 224 - DNA, 4101 bp, synthetic construct
  misc_feature 1..4101: note = Synthetic nCas9(H840A)
  source 1..4101: mol_type = other DNA
gacaagaagtacagcatcggcctggacatcggcaccaactctgtgggctgggccgtgatcaccgacgagtacaaggtgcccagcaagaaattcaaggtgctgggcaacaccgaccggcacagcatcaagaagaacctgatcggagccctgctgttcgacagcggcgaaacagccgaggccacccggctgaagagaaccgccagaagaagatacaccagacggaagaaccggatctgctatctgcaagagatcttcagcaacgagatggccaaggtggacgacagcttcttccacagactggaagagtccttcctggtggaagaggataagaagcacgagcggcaccccatcttcggcaacatcgtggacgaggtggcctaccacgagaagtaccccaccatctaccacctgagaaagaaactggtggacagcaccgacaaggccgacctgcggctgatctatctggccctggcccacatgatcaagttccggggccacttcctgatcgagggcgacctgaaccccgacaacagcgacgtggacaagctgttcatccagctggtgcagacctacaaccagctgttcgaggaaaaccccatcaacgccagcggcgtggacgccaaggccatcctgtctgccagactgagcaagagcagacggctggaaaatctgatcgcccagctgcccggcgagaagaagaatggcctgttcggaaacctgattgccctgagcctgggcctgacccccaacttcaagagcaacttcgacctggccgaggatgccaaactgcagctgagcaaggacacctacgacgacgacctggacaacctgctggcccagatcggcgaccagtacgccgacctgtttctggccgccaagaacctgtccgacgccatcctgctgagcgacatcctgagagtgaacaccgagatcaccaaggcccccctgagcgcctctatgatcaagagatacgacgagcaccaccaggacctgaccctgctgaaagctctcgtgcggcagcagctgcctgagaagtacaaagagattttcttcgaccagagcaagaacggctacgccggctacattgacggcggagccagccaggaagagttctacaagttcatcaagcccatcctggaaaagatggacggcaccgaggaactgctcgtgaagctgaacagagaggacctgctgcggaagcagcggaccttcgacaacggcagcatcccccaccagatccacctgggagagctgcacgccattctgcggcggcaggaagatttttacccattcctgaaggacaaccgggaaaagatcgagaagatcctgaccttccgcatcccctactacgtgggccctctggccaggggaaacagcagattcgcctggatgaccagaaagagcgaggaaaccatcaccccctggaacttcgaggaagtggtggacaagggcgcttccgcccagagcttcatcgagcggatgaccaacttcgataagaacctgcccaacgagaaggtgctgcccaagcacagcctgctgtacgagtacttcaccgtgtataacgagctgaccaaagtgaaatacgtgaccgagggaatgagaaagcccgccttcctgagcggcgagcagaaaaaggccatcgtggacctgctgttcaagaccaaccggaaagtgaccgtgaagcagctgaaagaggactacttcaagaaaatcgagtgcttcgactccgtggaaatctccggcgtggaagatcggttcaacgcctccctgggcacataccacgatctgctgaaaattatcaaggacaaggacttcctggacaatgaggaaaacgaggacattctggaagatatcgtgctgaccctgacactgtttgaggacagagagatgatcgaggaacggctgaaaacctatgcccacctgttcgacgacaaagtgatgaagcagctgaagcggcggagatacaccggctggggcaggctgagccggaagctgatcaacggcatccgggacaagcagtccggcaagacaatcctggatttcctgaagtccgacggcttcgccaacagaaacttcatgcagctgatccacgacgacagcctgacctttaaagaggacatccagaaagcccaggtgtccggccagggcgatagcctgcacgagcacattgccaatctggccggcagccccgccattaagaagggcatcctgcagacagtgaaggtggtggacgagctcgtgaaagtgatgggccggcacaagcccgagaacatcgtgatcgaaatggccagagagaaccagaccacccagaagggacagaagaacagccgcgagagaatgaagcggatcgaagagggcatcaaagagctgggcagccagatcctgaaagaacaccccgtggaaaacacccagctgcagaacgagaagctgtacctgtactacctgcagaatgggcgggatatgtacgtggaccaggaactggacatcaaccggctgtccgactacgatgtggacgccatcgtgcctcagagctttctgaaggacgactccatcgacaacaaggtgctgaccagaagcgacaagaaccggggcaagagcgacaacgtgccctccgaagaggtcgtgaagaagatgaagaactactggcggcagctgctgaacgccaagctgattacccagagaaagttcgacaatctgaccaaggccgagagaggcggcctgagcgaactggataaggccggcttcatcaagagacagctggtggaaacccggcagatcacaaagcacgtggcacagatcctggactcccggatgaacactaagtacgacgagaatgacaagctgatccgggaagtgaaagtgatcaccctgaagtccaagctggtgtccgatttccggaaggatttccagttttacaaagtgcgcgagatcaacaactaccaccacgcccacgacgcctacctgaacgccgtcgtgggaaccgccctgatcaaaaagtaccctaagctggaaagcgagttcgtgtacggcgactacaaggtgtacgacgtgcggaagatgatcgccaagagcgagcaggaaatcggcaaggctaccgccaagtacttcttctacagcaacatcatgaactttttcaagaccgagattaccctggccaacggcgagatccggaagcggcctctgatcgagacaaacggcgaaaccggggagatcgtgtgggataagggccgggattttgccaccgtgcggaaagtgctgagcatgccccaagtgaatatcgtgaaaaagaccgaggtgcagacaggcggcttcagcaaagagtctatcctgcccaagaggaacagcgataagctgatcgccagaaagaaggactgggaccctaagaagtacggcggcttcgacagccccaccgtggcctattctgtgctggtggtggccaaagtggaaaagggcaagtccaagaaactgaagagtgtgaaagagctgctggggatcaccatcatggaaagaagcagcttcgagaagaatcccatcgactttctggaagccaagggctacaaagaagtgaaaaaggacctgatcatcaagctgcctaagtactccctgttcgagctggaaaacggccggaagagaatgctggcctctgccggcgaactgcagaagggaaacgaactggccctgccctccaaatatgtgaacttcctgtacctggccagccactatgagaagctgaagggctcccccgaggataatgagcagaaacagctgtttgtggaacagcacaagcactacctggacgagatcatcgagcagatcagcgagttctccaagagagtgatcctggccgacgctaatctggacaaagtgctgtccgcctacaacaagcaccgggataagcccatcagagagcaggccgagaatatcatccacctgtttaccctgaccaatctgggagcccctgccgccttcaagtactttgacaccaccatcgaccggaagaggtacaccagcaccaaagaggtgctggacgccaccctgatccaccagagcatcaccggcctgtacgagacacggatcgacctgtctcagctgggaggtgac
